United States Patent Application Publication US 2023/0338579 A1 - sequence listing, part 4

SEQ ID NO: 8867 - RNA, 2673 nt, synthetic construct
  misc_feature 1..2673: note = derived and/or modified sequence opt2 fromKPCD3__Homo_sapiens__AAY14817
  source 1..2673: mol_type = other RNA
atgtccgccaacaactcccccccctccgcccagaagtccgtcctccccaccgccatccccgccgtcctccccgccgcctccccctgctcctcccccaagaccggcctctccgcccgcctctccaacggctccttctccgccccctccctcaccaactcccgcggctccgtccacaccgtctccttcctcctccagatcggcctcacccgcgagtccgtcaccatcgaggcccaggagctctccctctccgccgtcaaggacctcgtctgctccatcgtctaccagaagttccccgagtgcggcttcttcggcatgtacgacaagatcctcctcttccgccacgacatgaactccgagaacatcctccagctcatcacctccgccgacgagatccacgagggcgacctcgtcgaggtcgtcctctccgccctcgccaccgtcgaggacttccagatccgcccccacaccctctacgtccactcctacaaggcccccaccttctgcgactactgcggcgagatgctctggggcctcgtccgccagggcctcaagtgcgagggctgcggcctcaactaccacaagcgctgcgccttcaagatccccaacaactgctccggcgtccgcaagcgccgcctctccaacgtctccctccccggccccggcctctccgtcccccgccccctccagcccgagtacgtcgccctcccctccgaggagtcccacgtccaccaggagccctccaagcgcatcccctcctggtccggccgccccatctggatggagaagatggtcatgtgccgcgtcaaggtcccccacaccttcgccgtccactcctacacccgccccaccatctgccagtactgcaagcgcctcctcaagggcctcttccgccagggcatgcagtgcaaggactgcaagttcaactgccacaagcgctgcgcctccaaggtcccccgcgactgcctcggcgaggtcaccttcaacggcgagccctcctccctcggcaccgacaccgacatccccatggacatcgacaacaacgacatcaactccgactcctcccgcggcctcgacgacaccgaggagccctccccccccgaggacaagatgttcttcctcgacccctccgacctcgacgtcgagcgcgacgaggaggccgtcaagaccatctccccctccacctccaacaacatccccctcatgcgcgtcgtccagtccatcaagcacaccaagcgcaagtcctccaccatggtcaaggagggctggatggtccactacacctcccgcgacaacctccgcaagcgccactactggcgcctcgactccaagtgcctcaccctcttccagaacgagtccggctccaagtactacaaggagatccccctctccgagatcctccgcatctcctccccccgcgacttcaccaacatctcccagggctccaacccccactgcttcgagatcatcaccgacaccatggtctacttcgtcggcgagaacaacggcgactcctcccacaaccccgtcctcgccgccaccggcgtcggcctcgacgtcgcccagtcctgggagaaggccatccgccaggccctcatgcccgtcaccccccaggcctccgtctgcacctcccccggccagggcaaggaccacaaggacctctccacctccatctccgtctccaactgccagatccaggagaacgtcgacatctccaccgtctaccagatcttcgccgacgaggtcctcggctccggccagttcggcatcgtctacggcggcaagcaccgcaagaccggccgcgacgtcgccatcaaggtcatcgacaagatgcgcttccccaccaagcaggagtcccagctccgcaacgaggtcgccatcctccagaacctccaccaccccggcatcgtcaacctcgagtgcatgttcgagacccccgagcgcgtcttcgtcgtcatggagaagctccacggcgacatgctcgagatgatcctctcctccgagaagtcccgcctccccgagcgcatcaccaagttcatggtcacccagatcctcgtcgccctccgcaacctccacttcaagaacatcgtccactgcgacctcaagcccgagaacgtcctcctcgcctccgccgagcccttcccccaggtcaagctctgcgacttcggcttcgcccgcatcatcggcgagaagtccttccgccgctccgtcgtcggcacccccgcctacctcgcccccgaggtcctccgctccaagggctacaaccgctccctcgacatgtggtccgtcggcgtcatcatctacgtctccctctccggcaccttccccttcaacgaggacgaggacatcaacgaccagatccagaacgccgccttcatgtacccccccaacccctggcgcgagatctccggcgaggccatcgacctcatcaacaacctcctccaggtcaagatgcgcaagcgctactccgtcgacaagtccctctcccacccctggctccaggactaccagacctggctcgacctccgcgagttcgagacccgcatcggcgagcgctacatcacccacgagtccgacgacgcccgctgggagatccacgcctacacccacaacctcgtctaccccaagcacttcatcatggcccccaaccccgacgacatggaggaggacccctga

SEQ ID NO: 8868 - RNA, 2673 nt, synthetic construct
  misc_feature 1..2673: note = derived and/or modified sequence opt3 fromKPCD3__Homo_sapiens__AAY14817
  source 1..2673: mol_type = other RNA
atgagcgccaacaattcccctccttctgctcagaagtcagtgctgccaaccgcaatcccggccgtcctccccgcggctagtccttgcagctccccaaaaacaggcctttctgccagactgtcgaacgggtcattcagcgcacccagtttgactaattccaggggatctgttcacacggtgagctttttactgcaaattggtctaacccgggagtccgtaacaatagaagcccaggagctctcactgagtgctgtgaaggaccttgtctgtagcatcgtgtaccagaaattccctgaatgcggctttttcgggatgtatgataagattctgttgtttcgccatgacatgaactctgagaatatcctccagctgattacttccgcagatgaaatccacgagggagacctggttgaggtggtcctctcagccttagctaccgtggaagatttccaaatacgaccacatacactgtacgtacacagctataaagcccccaccttttgtgactactgcggcgagatgctttggggtttggttcgtcaggggctgaagtgtgaaggatgcggcctaaactatcataagagatgtgcgttcaaaatccctaataactgcagtggcgtgaggaagcggcgcctctctaatgtctccctgccagggccgggacttagcgtgcccagacctctgcagccagagtacgtggcattgccctcggaggaatctcacgtccaccaggagccttccaaaaggattccatcatggagtggtcggcccatctggatggaaaagatggttatgtgtcgcgtgaaagtaccgcatacttttgccgtgcacagctatacacgacctaccatttgccaatactgtaagagactcctgaagggcttattcaggcaggggatgcagtgcaaagattgcaagtttaactgtcataaacggtgcgcttccaaggtcccccgtgactgtctgggagaggtgacgttcaatggcgaaccatctagcctcggtactgataccgacatccctatggatatagacaacaatgatattaactcagacagttcccgcgggcttgacgatacagaggagcccagcccacccgaagacaaaatgtttttcctggatccttctgacttggatgttgagagagacgaagaggccgtgaagactatctcaccaagtaccagcaataacattccgctaatgagggtcgtgcagtccatcaaacacacaaagcggaagtcttcgaccatggtaaaagaaggatggatggttcactacacgagccgagataacctgcgcaagagacattattggaggctcgactccaaatgcctgactcttttccaaaatgagtcaggcagtaagtactataaagagatccccctgtctgaaattttgcggataagctcccctcgcgattttacaaacatctcacagggcagcaatccacactgtttcgagattatcaccgacactatggtgtactttgtcggggaaaacaatggagattcttcccataaccccgtgctcgcagctacaggtgtcggcctggacgtggcccagagttgggagaaggcgataagacaagccttaatgcctgttaccccacaggcaagcgtgtgcacgtctcccgggcagggaaaggaccacaaagatctgtccacctcaattagtgtaagcaattgtcagatccaagaaaacgtcgacatctcgacagtgtatcagattttcgctgatgaggttctaggctccggtcagtttgggatcgtgtacggcggaaagcataggaaaactggccgtgacgtcgccattaaggtgatagataaaatgcggttcccgaccaagcaggagtctcaactccgaaatgaagtagctatcctgcagaaccttcaccaccctgggattgtgaatttggagtgcatgtttgaaacaccagagagagttttcgtcgtgatggagaagctgcatggagacatgctcgaaatgatcctgagctcagagaaaagtaggcttcccgaacgcatcactaagtttatggtgacccagattctggtcgccttgcggaacctccacttcaaaaatatagttcattgtgatctgaagcctgagaacgtgttactggcatccgccgaaccctttccacaggtgaaactatgcgacttcggttttgctagaatcattggcgagaagtctttcaggcgcagcgtagtcgggacacccgcgtatctcgcacccgaggtgctgcgatccaagggatacaatcggtcacttgatatgtggagcgttggcgtgatcatttacgtcagtttgtctggtaccttcccatttaacgaagacgaggatatcaacgaccaaatacagaatgccgctttcatgtatccgcctaacccctggcgtgaaatctccggggaggccattgatctgatcaataacctcttacaggtgaaaatgagaaagaggtacagcgttgacaaatcgctgtcacacccatggctgcaggactatcaaacttggcttgatttgcgcgaatttgagacgcggattggcgagagatacatcacacacgaatctgacgatgcaaggtgggagatacatgcctatacccacaatctcgtgtaccccaagcatttcattatggctcctaacccagacgatatggaagaggacccctga

SEQ ID NO: 8869 - RNA, 2673 nt, synthetic construct
  misc_feature 1..2673: note = derived and/or modified sequence opt4 fromKPCD3__Homo_sapiens__AAY14817
  source 1..2673: mol_type = other RNA
atgagcgccaacaacagcccccccagcgcccagaagagcgtgctgcccaccgccatccccgccgtgctgcccgccgccagcccctgcagcagccccaagaccggcctgagcgccagactgagcaacggcagcttcagcgcccccagcctgaccaacagcagaggcagcgtgcacaccgtgagcttcctgctgcagatcggcctgaccagagagagcgtgaccatcgaggcccaggagctgagcctgagcgccgtgaaggacctggtgtgcagcatcgtgtaccagaagttccccgagtgcggcttcttcggcatgtacgacaagatcctgctgttcagacacgacatgaacagcgagaacatcctgcagctgatcaccagcgccgacgagatccacgagggcgacctggtggaggtggtgctgagcgccctggccaccgtggaggacttccagatcagaccccacaccctgtacgtgcacagctacaaggcccccaccttctgcgactactgcggcgagatgctgtggggcctggtgagacagggcctgaagtgcgagggctgcggcctgaactaccacaagagatgcgccttcaagatccccaacaactgcagcggcgtgagaaagagaagactgagcaacgtgagcctgcccggccccggcctgagcgtgcccagacccctgcagcccgagtacgtggccctgcccagcgaggagagccacgtgcaccaggagcccagcaagagaatccccagctggagcggcagacccatctggatggagaagatggtgatgtgcagagtgaaggtgccccacaccttcgccgtgcacagctacaccagacccaccatctgccagtactgcaagagactgctgaagggcctgttcagacagggcatgcagtgcaaggactgcaagttcaactgccacaagagatgcgccagcaaggtgcccagagactgcctgggcgaggtgaccttcaacggcgagcccagcagcctgggcaccgacaccgacatccccatggacatcgacaacaacgacatcaacagcgacagcagcagaggcctggacgacaccgaggagcccagcccccccgaggacaagatgttcttcctggaccccagcgacctggacgtggagagagacgaggaggccgtgaagaccatcagccccagcaccagcaacaacatccccctgatgagagtggtgcagagcatcaagcacaccaagagaaagagcagcaccatggtgaaggagggctggatggtgcactacaccagcagagacaacctgagaaagagacactactggagactggacagcaagtgcctgaccctgttccagaacgagagcggcagcaagtactacaaggagatccccctgagcgagatcctgagaatcagcagccccagagacttcaccaacatcagccagggcagcaacccccactgcttcgagatcatcaccgacaccatggtgtacttcgtgggcgagaacaacggcgacagcagccacaaccccgtgctggccgccaccggcgtgggcctggacgtggcccagagctgggagaaggccatcagacaggccctgatgcccgtgaccccccaggccagcgtgtgcaccagccccggccagggcaaggaccacaaggacctgagcaccagcatcagcgtgagcaactgccagatccaggagaacgtggacatcagcaccgtgtaccagatcttcgccgacgaggtgctgggcagcggccagttcggcatcgtgtacggcggcaagcacagaaagaccggcagagacgtggccatcaaggtgatcgacaagatgagattccccaccaagcaggagagccagctgagaaacgaggtggccatcctgcagaacctgcaccaccccggcatcgtgaacctggagtgcatgttcgagacccccgagagagtgttcgtggtgatggagaagctgcacggcgacatgctggagatgatcctgagcagcgagaagagcagactgcccgagagaatcaccaagttcatggtgacccagatcctggtggccctgagaaacctgcacttcaagaacatcgtgcactgcgacctgaagcccgagaacgtgctgctggccagcgccgagcccttcccccaggtgaagctgtgcgacttcggcttcgccagaatcatcggcgagaagagcttcagaagaagcgtggtgggcacccccgcctacctggcccccgaggtgctgagaagcaagggctacaacagaagcctggacatgtggagcgtgggcgtgatcatctacgtgagcctgagcggcaccttccccttcaacgaggacgaggacatcaacgaccagatccagaacgccgccttcatgtacccccccaacccctggagagagatcagcggcgaggccatcgacctgatcaacaacctgctgcaggtgaagatgagaaagagatacagcgtggacaagagcctgagccacccctggctgcaggactaccagacctggctggacctgagagagttcgagaccagaatcggcgagagatacatcacccacgagagcgacgacgccagatgggagatccacgcctacacccacaacctggtgtaccccaagcacttcatcatggcccccaaccccgacgacatggaggaggacccctga

SEQ ID NO: 8870 - RNA, 2673 nt, synthetic construct
  misc_feature 1..2673: note = derived and/or modified sequence opt5 fromKPCD3__Homo_sapiens__AAY14817
  source 1..2673: mol_type = other RNA
atgagcgccaacaattcccctccctctgctcagaagtctgtgctgccgaccgccatccccgcggtcctccctgctgcctccccctgctctagccctaaaacaggcctgtccgccagactttctaacgggagcttctccgctcccagcctgacgaatagccggggatccgttcacaccgtgagctttctcctgcaaattggccttacacgcgagtctgtgaccatcgaagcccaggagctgtccctcagcgctgtcaaggacctggtgtgttctattgtttaccagaaattccctgaatgcgggtttttcggaatgtatgataagatcctgctctttagacatgacatgaactccgagaatattctgcagcttatcacaagcgccgatgaaatccacgagggcgacctggtggaggtcgtgctctccgcgctggccaccgttgaagatttccaaattcggccgcatacactttacgtgcactcttataaagctcccaccttttgtgactactgcggggagatgctgtggggactcgtccgccagggcctgaagtgtgaaggctgcgggctgaactatcataagagatgtgccttcaaaatccctaataactgcagcggagtgcggaagcgcagactctccaatgtgagcctgcccggccctgggctttctgtcccccggccgctgcagcctgagtacgttgctctcccctccgaggaaagccacgtgcaccaggagccttctaaacgcattcccagctggtccggaagacccatctggatggaaaagatggtgatgtgtcgggtcaaagtgcctcatacgtttgccgttcactcttatacccgcccgacaatttgccaatactgtaagagactgcttaagggcctgttccggcaggggatgcagtgcaaagattgcaagtttaactgtcataaacgctgcgcgagcaaggtgcccagagactgtctcggagaggtcaccttcaatggcgaaccttccagcctgggcacagataccgacatccccatggatattgacaacaatgatatcaactctgactccagccgggggctggacgatacggaggagccttctcccccggaagacaaaatgtttttcctcgatccttccgacctggatgtggagagagacgaagaggccgttaagacaatcagcccctccacctctaataacattcctcttatgcgcgtggtccagagcatcaaacacacaaagcggaagtcctctaccatggtgaaagaaggatggatggtccactacaccagcagagataacctgcgcaagcggcattattggagactcgactccaaatgcctgacacttttccaaaatgagagcggctctaagtactataaagagattcccctgtccgaaatcctccgcattagctctcctcgggattttacgaacatctcccaggggagcaatccccactgtttcgagatcattaccgacacaatggtgtactttgttggagaaaacaatggcgattctagccataacccggtgctggctgccaccggggtcggactggacgtggctcagtcctgggagaaggccatcagacaagccctcatgcctgttacaccccaggctagcgtgtgcacctctcccggccagggcaaggaccacaaagatctgtccacgagcatttccgtctctaattgtcagatccaagaaaacgtggacattagcacagtgtatcagatcttcgcggatgaggttcttgggtccggacagtttggcatcgtctacgggggaaagcatcgcaaaaccggccgggacgtggccattaaggtgatcgataaaatgagattccctaccaagcaggagtctcaactgcgcaatgaagtcgctattctccagaacctgcaccacccggggatcgtgaatctggagtgcatgtttgaaacacccgagcgggttttcgtggtcatggagaaacttcatggcgacatgctcgaaatgattctgagctccgagaagtctagactgcctgaacggatcaccaagtttatggtgacacagattctcgttgccctgcgcaaccttcacttcaaaaatatcgtgcattgtgatctgaagcccgagaacgtcctcctggccagcgctgaaccttttccccaggtgaaactgtgcgacttcggatttgccagaatcattggcgagaagtccttccggagaagcgttgtggggacgcctgcgtatcttgctcccgaggtcctccgctctaagggatacaatcggtccctggatatgtggagcgtgggcgtgatcatttacgtctctctgtccgggaccttcccgtttaacgaagacgaggatatcaacgaccaaattcagaatgccgccttcatgtatcctcccaacccttggagagaaatcagcggagaggctatcgatctcattaataacctgcttcaggttaaaatgcgcaagagatactctgtggacaaatccctgagccacccctggctccaggactatcaaacatggctggatctgcgggaatttgagacccgcatcggcgagagatacattacacacgaatccgacgatgcccggtgggagatccatgcttatacccacaatcttgtgtacccgaagcatttcattatggcccctaaccccgacgatatggaagaggacccttga

SEQ ID NO: 8871 - protein, 676 aa, synthetic construct
  REGION 1..676: note = KPCD__Homo_sapiens__Q05655
MAPFLRIAFNSYELGSLQAEDEANQPFCAVKMKEALSTERGKTLVQKKPTMYPEWKSTFDAHIYEGRVIQIVLMRAAEEPVSEVTVGVSVLAERCKKNNGKAEFWLDLQPQAKVLMSVQYFLEDVDCKQSMRSEDEAKFPTMNRRGAIKQAKIHYIKNHEFIATFFGQPTFCSVCKDFVWGLNKQGYKCRQCNAAIHKKCIDKIIGRCTGTAANSRDTIFQKERFNIDMPHRFKVHNYMSPTFCDHCGSLLWGLVKQGLKCEDCGMNVHHKCREKVANLCGINQKLLAEALNQVTQRASRRSDSASSEPVGIYQGFEKKTGVAGEDMQDNSGTYGKIWEGSSKCNINNFIFHKVLGKGSFGKVLLGELKGRGEYFAIKALKKDVVLIDDDVECTMVEKRVLTLAAENPFLTHLICTFQTKDHLFFVMEFLNGGDLMYHIQDKGRFELYRATFYAAEIMCGLQFLHSKGIIYRDLKLDNVLLDRDGHIKIADFGMCKENIFGESRASTFCGTPDYIAPEILQGLKYTFSVDWWSFGVLLYEMLIGQSPFHGDDEDELFESIRVDTPHYPRWITKESKDILEKLFEREPTKRLGVTGNIKIHPFFKTINWTLLEKRRLEPPFRPKVKSPRDYSNFDQEFLNEKARLSYSDKNLIDSMDQSAFAGFSFVNPKFEHLLED

SEQ ID NO: 8872 - RNA, 2031 nt, synthetic construct
  misc_feature 1..2031: note = KPCD__Homo_sapiens__AAA03175
  source 1..2031: mol_type = other RNA
atggcgccgttcctgcgcatcgccttcaactcctatgagctgggctccctgcaggccgaggacgaggcgaaccagcccttctgtgccgtgaagatgaaggaggcgctcagcacagagcgtgggaaaacactggtgcagaagaagccgaccatgtatcctgagtggaagtcgacgttcgatgcccacatctatgaggggcgcgtcatccagattgtgctaatgcgggcagcagaggagccagtgtctgaggtgaccgtgggtgtgtcggtgctggccgagcgctgcaagaagaacaatggcaaggctgagttctggctggacctgcagcctcaggccaaggtgttgatgtctgttcagtatttcctggaggacgtggattgcaaacagtctatgcgcagtgaggacgaggccaagttcccaacgatgaaccgccgcggagccatcaaacaggccaaaatccactacatcaagaaccatgagtttatcgccaccttctttgggcaacccaccttctgttctgtgtgcaaagactttgtctggggcctcaacaagcaaggctacaaatgcaggcaatgtaacgctgccatccacaagaaatgcatcgacaagatcatcggcagatgcactggcaccgcggccaacagccgggacactatattccagaaagaacgcttcaacatcgacatgccgcaccgcttcaaggttcacaactacatgagccccaccttctgtgaccactgcggcagcctgctctggggactggtgaagcagggattaaagtgtgaagactgcggcatgaatgtgcaccataaatgccgggagaaggtggccaacctctgcggcatcaaccagaagcttttggctgaggccttgaaccaagtcacccagagagcctcccggagatcagactcagcctcctcagagcctgttgggatatatcagggtttcgagaagaagaccggagttgctggggaggacatgcaagacaacagtgggacctacggcaagatctgggagggcagcagcaagtgcaacatcaacaacttcatcttccacaaggtcctgggcaaaggcagcttcgggaaggtgctgcttggagagctgaagggcagaggagagtactttgccatcaaggccctcaagaaggatgtggtcctgatcgacgacgacgtggagtgcaccatggttgagaagcgggtgctgacacttgccgcagagaatccctttctcacccacctcatctgcaccttccagaccaaggaccacctgttctttgtgatggagttcctcaacgggggggacctgatgtaccacatccaggacaaaggccgctttgaactctaccgtgccacgttttatgccgctgagataatgtgtggactgcagtttctacacagcaagggcatcatttacagggacctcaaactggacaatgtgctgttggaccgggatggccacatcaagattgccgactttgggatgtgcaaagagaacatattcggggagagccgggccagcaccttctgcggcacccctgactatatcgcccctgagatcctacagggcctgaagtacacattctctgtggactggtggtctttcggggtccttctgtacgagatgctcattggccagtcccccttccatggtgatgatgaggatgaactcttcgagtccatccgtgtggacacgccacattatccccgctggatcaccaaggagtccaaggacatcctggagaagctctttgaaagggaaccaaccaagaggctgggagtgacgggaaacatcaaaatccaccccttcttcaagaccataaactggactctgctggaaaagcggaggttggagccacccttcaggcccaaagtgaagtcacccagagactacagtaactttgaccaggagttcctgaacgagaaggcgcgcctctcctacagcgacaagaacctcatcgactccatggaccagtctgcattcgctggcttctcctttgtgaaccccaaattcgagcacctcctggaagattga

SEQ ID NO: 8873 - RNA, 2031 nt, synthetic construct
  misc_feature 1..2031: note = derived and/or modified sequence opt1 fromKPCD__Homo_sapiens__AAA03175
  source 1..2031: mol_type = other RNA
atggcccccttcctgcgcatcgccttcaacagctacgagctcggctccctgcaggcggaggacgaggccaaccagcccttctgcgccgtgaagatgaaggaggccctgagcaccgagcgggggaagaccctcgtccagaagaagcccacgatgtaccccgagtggaagtccaccttcgacgcccacatctacgagggccgcgtgatccagatcgtgctgatgcgggcggccgaggagcccgtcagcgaggtgaccgtgggggtctccgtgctggccgagcgctgcaagaagaacaacggcaaggccgagttctggctcgacctgcagccgcaggcgaaggtgctgatgagcgtccagtacttcctcgaggacgtggactgcaagcagtccatgcggagcgaggacgaggccaagttccccaccatgaaccgccgcggggccatcaagcaggccaagatccactacatcaagaaccacgagttcatcgccacgttcttcggccagcccaccttctgctccgtgtgcaaggacttcgtctggggcctgaacaagcaggggtacaagtgccggcagtgcaacgcggccatccacaagaagtgcatcgacaagatcatcggccggtgcaccgggaccgccgccaacagccgcgacacgatcttccagaaggagcggttcaacatcgacatgccccaccgcttcaaggtgcacaactacatgtccccgaccttctgcgaccactgcggcagcctgctctgggggctggtgaagcagggcctgaagtgcgaggactgcggcatgaacgtccaccacaagtgccgggagaaggtggccaacctctgcgggatcaaccagaagctgctggcggaggccctcaaccaggtgacccagcgcgcctcccggcgcagcgactccgccagctccgagcccgtcggcatctaccaggggttcgagaagaagaccggcgtggccggcgaggacatgcaggacaacagcgggacgtacggcaagatctgggaggggtccagcaagtgcaacatcaacaacttcatcttccacaaggtgctgggcaaggggagcttcggcaaggtcctgctcggcgagctgaaggggcggggcgagtacttcgcgatcaaggccctgaagaaggacgtggtgctcatcgacgacgacgtcgagtgcaccatggtggagaagcgcgtcctgaccctggccgccgagaaccccttcctcacccacctgatctgcacgttccagaccaaggaccacctgttcttcgtgatggagttcctcaacgggggcgacctgatgtaccacatccaggacaaggggcggttcgagctgtaccgcgccaccttctacgcggccgagatcatgtgcggcctccagttcctgcactccaagggcatcatctaccgggacctgaagctcgacaacgtgctgctggaccgcgacgggcacatcaagatcgccgacttcggcatgtgcaaggagaacatcttcggggagagccgcgcctccaccttctgcggcacgcccgactacatcgcgccggagatcctccaggggctgaagtacaccttcagcgtcgactggtggtccttcggcgtgctgctctacgagatgctgatcggccagagccccttccacggggacgacgaggacgagctgttcgagtccatccgggtggacacgccccactacccccgctggatcaccaaggagagcaaggacatcctcgagaagctgttcgagcgggagccgaccaagcgcctgggcgtcaccgggaacatcaagatccaccccttcttcaagaccatcaactggaccctcctggagaagcggcgcctggagccgcccttccggcccaaggtgaagtccccgcgcgactacagcaacttcgaccaggagttcctgaacgagaaggcccggctctcctacagcgacaagaacctgatcgactccatggaccagagcgccttcgccggcttctccttcgtgaaccccaagttcgagcacctcctggaggactga

SEQ ID NO: 8874 - RNA, 2031 nt, synthetic construct
  misc_feature 1..2031: note = derived and/or modified sequence opt2 fromKPCD__Homo_sapiens__AAA03175
  source 1..2031: mol_type = other RNA
atggcccccttcctccgcatcgccttcaactcctacgagctcggctccctccaggccgaggacgaggccaaccagcccttctgcgccgtcaagatgaaggaggccctctccaccgagcgcggcaagaccctcgtccagaagaagcccaccatgtaccccgagtggaagtccaccttcgacgcccacatctacgagggccgcgtcatccagatcgtcctcatgcgcgccgccgaggagcccgtctccgaggtcaccgtcggcgtctccgtcctcgccgagcgctgcaagaagaacaacggcaaggccgagttctggctcgacctccagccccaggccaaggtcctcatgtccgtccagtacttcctcgaggacgtcgactgcaagcagtccatgcgctccgaggacgaggccaagttccccaccatgaaccgccgcggcgccatcaagcaggccaagatccactacatcaagaaccacgagttcatcgccaccttcttcggccagcccaccttctgctccgtctgcaaggacttcgtctggggcctcaacaagcagggctacaagtgccgccagtgcaacgccgccatccacaagaagtgcatcgacaagatcatcggccgctgcaccggcaccgccgccaactcccgcgacaccatcttccagaaggagcgcttcaacatcgacatgccccaccgcttcaaggtccacaactacatgtcccccaccttctgcgaccactgcggctccctcctctggggcctcgtcaagcagggcctcaagtgcgaggactgcggcatgaacgtccaccacaagtgccgcgagaaggtcgccaacctctgcggcatcaaccagaagctcctcgccgaggccctcaaccaggtcacccagcgcgcctcccgccgctccgactccgcctcctccgagcccgtcggcatctaccagggcttcgagaagaagaccggcgtcgccggcgaggacatgcaggacaactccggcacctacggcaagatctgggagggctcctccaagtgcaacatcaacaacttcatcttccacaaggtcctcggcaagggctccttcggcaaggtcctcctcggcgagctcaagggccgcggcgagtacttcgccatcaaggccctcaagaaggacgtcgtcctcatcgacgacgacgtcgagtgcaccatggtcgagaagcgcgtcctcaccctcgccgccgagaaccccttcctcacccacctcatctgcaccttccagaccaaggaccacctcttcttcgtcatggagttcctcaacggcggcgacctcatgtaccacatccaggacaagggccgcttcgagctctaccgcgccaccttctacgccgccgagatcatgtgcggcctccagttcctccactccaagggcatcatctaccgcgacctcaagctcgacaacgtcctcctcgaccgcgacggccacatcaagatcgccgacttcggcatgtgcaaggagaacatcttcggcgagtcccgcgcctccaccttctgcggcacccccgactacatcgcccccgagatcctccagggcctcaagtacaccttctccgtcgactggtggtccttcggcgtcctcctctacgagatgctcatcggccagtcccccttccacggcgacgacgaggacgagctcttcgagtccatccgcgtcgacaccccccactacccccgctggatcaccaaggagtccaaggacatcctcgagaagctcttcgagcgcgagcccaccaagcgcctcggcgtcaccggcaacatcaagatccaccccttcttcaagaccatcaactggaccctcctcgagaagcgccgcctcgagccccccttccgccccaaggtcaagtccccccgcgactactccaacttcgaccaggagttcctcaacgagaaggcccgcctctcctactccgacaagaacctcatcgactccatggaccagtccgccttcgccggcttctccttcgtcaaccccaagttcgagcacctcctcgaggactga

SEQ ID NO: 8875 - RNA, 2031 nt, synthetic construct
  misc_feature 1..2031: note = derived and/or modified sequence opt3 fromKPCD__Homo_sapiens__AAA03175
  source 1..2031: mol_type = other RNA
atggcccccttcctgagaatcgcttttaacagctacgagctcggctcccttcaggcagaagacgaggccaatcaacctttctgcgcggtgaagatgaaagaagctctgtctaccgagagggggaagacattggtccagaaaaagccaactatgtatccggaatggaaatcaacgtttgatgcccacatttacgagggacgggttatacagatcgtgttaatgcgcgcagccgaggaacccgtaagtgaggtgaccgtcggtgtgagcgttctggctgaacgatgtaagaagaacaatggcaaagcagagttctggctagacctccagcctcaagccaaggtgctgatgtccgtccagtattttcttgaggatgtggactgcaaacagtctatgcgttcggaagatgaggctaagttcccaacaatgaacagaaggggagccattaaacaggcgaagatccattacattaagaatcacgaatttatcgcaactttctttgggcaacccaccttctgttcagtatgcaaagactttgtttggggcctgaacaagcagggttataaatgtcggcagtgcaatgccgctatacataagaaatgtatcgataagattatcgggcgctgcacaggaaccgccgcaaacagcagagacactattttccagaaagagaggtttaatatcgatatgcctcaccggttcaaggtgcataactacatgagtccaacattctgtgaccactgcggctccttgctctggggcctggtcaagcaagggctgaaatgtgaagattgcggaatgaatgtgcaccataagtgccgcgagaaagtggctaacctctgtggtataaatcagaagttactggccgaggcgcttaaccaggtcacccaacgagcctctagaaggagcgactccgcatcaagtgaacccgttggcatttatcaggggtttgagaaaaagacgggagtggctggcgaagatatgcaggacaatagcggtacttacgggaagatctgggagggatcttccaaatgcaacattaacaatttcatctttcacaaggtattgggcaaaggctcattcgggaaggtgctgctaggagaactcaaaggtcggggcgagtactttgccatcaaggctctgaagaaagacgtcgtgcttattgatgacgatgttgagtgtaccatggtggaaaagcgtgtcctgacattggccgcagagaaccctttcctcactcatctgatatgcacctttcagacaaaagaccacttattctttgtgatggaatttctgaatgggggagatctcatgtatcacatccaagacaagggccgctttgagctttacagagccaccttctatgctgcggaaattatgtgtggtctgcagtttttgcatagcaaagggatcatatacagggatctaaagctggacaacgtactcctggatcgggacggccacattaagatcgcagatttcggaatgtgcaaagagaatatcttcggcgagagtcgagcctctacgttttgtgggactccagactatattgctccggaaatccttcagggactgaagtacacattctccgttgactggtggagctttggtgtgttgctctatgagatgctgattggccagtcgcccttccatggggatgacgaagatgagttatttgagtctatacgcgtcgacacccctcactacccaagatggatcactaaagaatccaaggatattctggagaaactattcgaaagggagcccacaaagcggctcggagtgaccggcaacatcaaaatccatcctttcttcaagacgattaattggaccctgcttgaaaagcgcagattggagccaccctttaggccgaaagtcaagtcacctcgtgactacagtaacttcgatcaagagtttctgaatgaaaaagcccggctcagctattccgacaagaacctgatagattctatggaccagagcgcattcgccggtttttcattcgtgaatcccaaattcgagcaccttctggaagattga

SEQ ID NO: 8876 - RNA, 2031 nt, synthetic construct
  misc_feature 1..2031: note = derived and/or modified sequence opt4 fromKPCD__Homo_sapiens__AAA03175
  source 1..2031: mol_type = other RNA
atggcccccttcctgagaatcgccttcaacagctacgagctgggcagcctgcaggccgaggacgaggccaaccagcccttctgcgccgtgaagatgaaggaggccctgagcaccgagagaggcaagaccctggtgcagaagaagcccaccatgtaccccgagtggaagagcaccttcgacgcccacatctacgagggcagagtgatccagatcgtgctgatgagagccgccgaggagcccgtgagcgaggtgaccgtgggcgtgagcgtgctggccgagagatgcaagaagaacaacggcaaggccgagttctggctggacctgcagccccaggccaaggtgctgatgagcgtgcagtacttcctggaggacgtggactgcaagcagagcatgagaagcgaggacgaggccaagttccccaccatgaacagaagaggcgccatcaagcaggccaagatccactacatcaagaaccacgagttcatcgccaccttcttcggccagcccaccttctgcagcgtgtgcaaggacttcgtgtggggcctgaacaagcagggctacaagtgcagacagtgcaacgccgccatccacaagaagtgcatcgacaagatcatcggcagatgcaccggcaccgccgccaacagcagagacaccatcttccagaaggagagattcaacatcgacatgccccacagattcaaggtgcacaactacatgagccccaccttctgcgaccactgcggcagcctgctgtggggcctggtgaagcagggcctgaagtgcgaggactgcggcatgaacgtgcaccacaagtgcagagagaaggtggccaacctgtgcggcatcaaccagaagctgctggccgaggccctgaaccaggtgacccagagagccagcagaagaagcgacagcgccagcagcgagcccgtgggcatctaccagggcttcgagaagaagaccggcgtggccggcgaggacatgcaggacaacagcggcacctacggcaagatctgggagggcagcagcaagtgcaacatcaacaacttcatcttccacaaggtgctgggcaagggcagcttcggcaaggtgctgctgggcgagctgaagggcagaggcgagtacttcgccatcaaggccctgaagaaggacgtggtgctgatcgacgacgacgtggagtgcaccatggtggagaagagagtgctgaccctggccgccgagaaccccttcctgacccacctgatctgcaccttccagaccaaggaccacctgttcttcgtgatggagttcctgaacggcggcgacctgatgtaccacatccaggacaagggcagattcgagctgtacagagccaccttctacgccgccgagatcatgtgcggcctgcagttcctgcacagcaagggcatcatctacagagacctgaagctggacaacgtgctgctggacagagacggccacatcaagatcgccgacttcggcatgtgcaaggagaacatcttcggcgagagcagagccagcaccttctgcggcacccccgactacatcgcccccgagatcctgcagggcctgaagtacaccttcagcgtggactggtggagcttcggcgtgctgctgtacgagatgctgatcggccagagccccttccacggcgacgacgaggacgagctgttcgagagcatcagagtggacaccccccactaccccagatggatcaccaaggagagcaaggacatcctggagaagctgttcgagagagagcccaccaagagactgggcgtgaccggcaacatcaagatccaccccttcttcaagaccatcaactggaccctgctggagaagagaagactggagccccccttcagacccaaggtgaagagccccagagactacagcaacttcgaccaggagttcctgaacgagaaggccagactgagctacagcgacaagaacctgatcgacagcatggaccagagcgccttcgccggcttcagcttcgtgaaccccaagttcgagcacctgctggaggactga

SEQ ID NO: 8877 - RNA, 2031 nt, synthetic construct
  misc_feature 1..2031: note = derived and/or modified sequence opt5 fromKPCD__Homo_sapiens__AAA03175
  source 1..2031: mol_type = other RNA
atggcccccttcctgagaatcgcttttaacagctacgagctcggctccctgcaggccgaagacgaggcgaatcaacctttctgcgctgtgaagatgaaagaagccctttctaccgagcgggggaagacactggtccagaaaaagccgacgatgtatcccgaatggaaaagcacctttgatgcccacatttacgagggacgcgttatccagattgtgctcatgagagctgccgaggaacctgtgtccgaggtcacagtgggcgtttctgtgctggctgaacggtgtaagaagaacaatgggaaagccgagttctggcttgacctgcagccccaagcgaaggtcctcatgagcgtgcagtattttctggaggatgttgactgcaaacagtccatgcgctctgaagatgaggccaagttccctaccatgaacagacggggagctatcaaacaggccaagattcactacatcaagaatcacgaatttatcgctacattctttggccaacccaccttctgtagcgtgtgcaaagactttgtctgggggctgaacaagcagggatataaatgtcgccagtgcaatgccgcgattcataagaaatgtatcgataagattatcggcagatgcacaggcaccgccgctaactcccgggacacgattttccagaaagagcgctttaatatcgatatgcctcacagattcaaggtgcataactacatgagcccgaccttctgtgaccactgcgggtctctcctgtggggacttgtgaagcaaggcctgaaatgtgaagattgcgggatgaatgtccaccataagtgccgggagaaagttgccaacctctgtggaattaatcagaagctgcttgctgaggccctgaaccaggtgacacaacgcgcctccagacggagcgactctgcttccagcgaacccgtgggcatctatcaggggtttgagaaaaagaccggagtcgcgggcgaagatatgcaggacaattctggcacatacgggaagatctgggagggatccagcaaatgcaacattaacaatttcatctttcacaaggtgctcggcaaagggtccttcggaaaggttctgctgggcgaactcaaagggcgcggagagtactttgccattaaggctctgaagaaagacgtggtccttatcgatgacgatgtggagtgtaccatggttgaaaagagagtgctgacgctcgccgccgagaaccctttcctgacacatcttatttgcacctttcagacaaaagaccacctgttctttgtcatggagttcctcaatggcggcgatctgatgtatcacatccaagacaaggggcggtttgaactgtacagagctaccttctatgccgcggaaatcatgtgtggactccagtttctgcattctaaaggcattatctaccgcgatcttaagctggacaacgtgctcctggatcgggacgggcacattaagatcgctgatttcggaatgtgcaaagagaatattttcggcgagagcagagcctccaccttttgtgggacacccgactatatcgcccctgaaatccttcagggcctgaagtacacgttcagcgtcgactggtggtcttttggagtgctcctgtatgagatgctgattggccagtcccccttccatggggatgacgaagatgagctctttgagagcatccgcgttgacaccccgcactaccctcggtggattacaaaagaatctaaggatatcctggagaaacttttcgaaagagagcccaccaagcgcctgggagtgacaggcaacattaaaatccatccctttttcaagaccattaattggacgctcctggaaaagcggagactggagcctccctttcgccctaaagtcaagagcccgcgggactactccaacttcgatcaagagtttcttaatgaaaaagctagactctcttatagcgacaagaacctgatcgattccatggaccagagcgccttcgctgggttttctttcgtgaatcccaaattcgagcatctgctcgaagattga

SEQ ID NO: 8878 - protein, 737 aa, synthetic construct
  REGION 1..737: note = KPCE__Homo_sapiens__Q02156
MVVFNGLLKIKICEAVSLKPTAWSLRHAVGPRPQTFLLDPYIALNVDDSRIGQTATKQKTNSPAWHDEFVTDVCNGRKIELAVFHDAPIGYDDFVANCTIQFEELLQNGSRHFEDWIDLEPEGRVYVIIDLSGSSGEAPKDNEERVFRERMRPRKRQGAVRRRVHQVNGHKFMATYLRQPTYCSHCRDFIWGVIGKQGYQCQVCTCVVHKRCHELIITKCAGLKKQETPDQVGSQRFSVNMPHKFGIHNYKVPTFCDHCGSLLWGLLRQGLQCKVCKMNVHRRCETNVAPNCGVDARGIAKVLADLGVTPDKITNSGQRRKKLIAGAESPQPASGSSPSEEDRSKSAPTSPCDQEIKELENNIRKALSFDNRGEEHRAASSPDGQLMSPGENGEVRQGQAKRLGLDEFNFIKVLGKGSFGKVMLAELKGKDEVYAVKVLKKDVILQDDDVDCTMTEKRILALARKHPYLTQLYCCFQTKDRLFFVMEYVNGGDLMFQIQRSRKFDEPRSRFYAAEVTSALMFLHQHGVIYRDLKLDNILLDAEGHCKLADFGMCKEGILNGVTTTTFCGTPDYIAPEILQELEYGPSVDWWALGVLMYEMMAGQPPFEADNEDDLFESILHDDVLYPVWLSKEAVSILKAFMTKNPHKRLGCVASQNGEDAIKQHPFFKEIDWVLLEQKKIKPPFKPRIKTKRDVNNFDQDFTREEPVLTLVDEAIVKQINQEEFKGFSYFGEDLMP

SEQ ID NO: 8879 - RNA, 2214 nt, synthetic construct
  misc_feature 1..2214: note = KPCE__Homo_sapiens__AAI09034
  source 1..2214: mol_type = other RNA
atggtagtgttcaatggccttcttaagatcaaaatctgcgaggccgtgagcttgaagcccacagcctggtcgctgcgccatgcggtgggaccccggccgcagactttccttctcgacccctacattgccctcaatgtggacgactcgcgcatcggccaaacggccaccaagcagaagaccaacagcccggcctggcacgacgagttcgtcaccgatgtgtgcaacggacgcaagatcgagctggctgtctttcacgatgcccccataggctacgacgacttcgtggccaactgcaccatccagtttgaggagctgctgcagaacgggagccgccacttcgaggactggattgatctggagccagaaggaagagtgtatgtgatcatcgatctctcagggtcgtcgggtgaagcccctaaagacaatgaagagcgtgtgttcagggaacgcatgcggccgaggaagcggcagggggccgtcaggcgcagggtccatcaggtcaacggccacaagttcatggccacctatcttcggcagcccacctactgctcccattgcagagacttcatctggggtgtcataggaaagcagggataccagtgtcaagtctgcacctgcgtggtccacaagcggtgccacgagctcataatcacaaagtgtgctgggttaaagaagcaggagacccccgaccaggtgggctcccagcggttcagcgtcaacatgccccacaagttcggtatccacaactacaaggtccctaccttctgcgatcactgtgggtccctgctctggggactcttgcggcagggtttgcagtgtaaagtctgcaaaatgaatgttcaccgtcgatgtgagaccaacgtggctcccaactgtggagtggatgccagaggaatcgccaaagtactggccgacctgggcgttaccccagacaaaatcaccaacagcggccagagaaggaaaaagctcattgctggtgccgagtccccgcagcctgcttctggaagctcaccatctgaggaagatcgatccaagtcagcacccacctccccttgtgaccaggaaataaaagaacttgagaacaacattcggaaagccttgtcatttgacaaccgaggagaggagcaccgggcagcatcgtctcctgatggccagctgatgagccccggtgagaatggcgaagtccggcaaggccaggccaagcgcctgggcctggatgagttcaacttcatcaaggtgttgggcaaaggcagctttggcaaggtcatgttggcagaactcaagggcaaagatgaagtatatgctgtgaaggtcttaaagaaggacgtcatccttcaggatgatgacgtggactgcacaatgacagagaagaggattttggctctggcacggaaacacccgtaccttacccaactctactgctgcttccagaccaaggaccgcctctttttcgtcatggaatatgtaaatggtggagacctcatgtttcagattcagcgctcccgaaaattcgacgagcctcgttcacggttctatgctgcagaggtcacatcggccctcatgttcctccaccagcatggagtcatctacagggatttgaaactggacaacatccttctggatgcagaaggtcactgcaagctggctgacttcgggatgtgcaaggaagggattctgaatggtgtgacgaccaccacgttctgtgggactcctgactacatagctcctgagatcctgcaggagttggagtatggcccctccgtggactggtgggccctgggggtgctgatgtacgagatgatggctggacagcctccctttgaggccgacaatgaggacgacctatttgagtccatcctccatgacgacgtgctgtacccagtctggctcagcaaggaggctgtcagcatcttgaaagctttcatgacgaagaatccccacaagcgcctgggctgtgtggcatcgcagaatggcgaggacgccatcaagcagcacccattcttcaaagagattgactgggtgctcctggagcagaagaagatcaagccacccttcaaaccacgcattaaaaccaaaagagacgtcaataattttgaccaagactttacccgggaagagccggtactcacccttgtggacgaagcaattgtaaagcagatcaaccaggaggaattcaaaggtttctcctactttggtgaagacctgatgccctga

SEQ ID NO: 8880 - RNA, 2214 nt, synthetic construct
  misc_feature 1..2214: note = derived and/or modified sequence opt1 fromKPCE__Homo_sapiens__AAI09034
  source 1..2214: mol_type = other RNA
atggtggtcttcaacggcctgctcaagatcaagatctgcgaggccgtgagcctgaagcccaccgcctggtccctgcgccacgcggtggggccgcggccccagaccttcctcctggacccctacatcgccctgaacgtcgacgacagccgcatcggccagacggccaccaagcagaagaccaactcccccgcctggcacgacgagttcgtgaccgacgtgtgcaacgggcggaagatcgagctcgccgtcttccacgacgcgccgatcggctacgacgacttcgtggccaactgcacgatccagttcgaggagctgctgcagaacgggagccgccacttcgaggactggatcgacctcgagcccgagggccgggtgtacgtcatcatcgacctgtccggcagctccggggaggcccccaaggacaacgaggagcgcgtgttccgggagcgcatgcggccccgcaagcggcagggcgccgtgcgccggcgcgtccaccaggtgaacgggcacaagttcatggcgacctacctgcggcagccgacctactgcagccactgccgcgacttcatctggggcgtgatcgggaagcagggctaccagtgccaggtctgcacgtgcgtggtgcacaagcggtgccacgagctcatcatcaccaagtgcgccggcctgaagaagcaggagacccccgaccaggtcgggtcccagcgcttcagcgtgaacatgccccacaagttcggcatccacaactacaaggtgcccaccttctgcgaccactgcgggtccctgctctggggcctgctgcggcagggcctccagtgcaaggtctgcaagatgaacgtgcaccgccggtgcgagaccaacgtggccccgaactgcggggtcgacgcccgcggcatcgccaaggtgctggcggacctgggggtcacgcccgacaagatcaccaacagcggccagcgccggaagaagctcatcgccggggccgagagcccccagcccgcctccggctccagcccgtccgaggaggaccgcagcaagtccgcccccaccagcccctgcgaccaggagatcaaggagctggagaacaacatccggaaggcgctgagcttcgacaaccgcggcgaggagcaccgggccgcctccagccccgacgggcagctcatgtccccgggcgagaacggggaggtgcgccagggccaggccaagcggctggggctggacgagttcaacttcatcaaggtgctcggcaagggcagcttcgggaaggtcatgctggccgagctgaagggcaaggacgaggtgtacgcggtgaaggtcctcaagaaggacgtgatcctgcaggacgacgacgtggactgcaccatgacggagaagcgcatcctggccctcgcccggaagcacccctacctgacccagctgtactgctgcttccagaccaaggaccgcctcttcttcgtcatggagtacgtgaacgggggcgacctgatgttccagatccagcggtcccgcaagttcgacgagccccggagccgcttctacgccgccgaggtgacctccgcgctgatgttcctccaccagcacggggtcatctaccgggacctgaagctggacaacatcctcctggacgccgagggccactgcaagctggccgacttcggcatgtgcaaggaggggatcctcaacggcgtgacgaccaccaccttctgcgggacgcccgactacatcgccccggagatcctgcaggagctggagtacggccccagcgtggactggtgggcgctcggcgtcctgatgtacgagatgatggccgggcagccgcccttcgaggccgacaacgaggacgacctgttcgagtccatcctgcacgacgacgtgctctaccccgtgtggctgagcaaggaggccgtctccatcctgaaggccttcatgaccaagaacccccacaagcgcctcggctgcgtggcgagccagaacggggaggacgccatcaagcagcaccccttcttcaaggagatcgactgggtgctgctggagcagaagaagatcaagccgcccttcaagccccggatcaagaccaagcgcgacgtcaacaacttcgaccaggacttcacccgggaggagcccgtgctcacgctggtggacgaggccatcgtcaagcagatcaaccaggaggagttcaagggcttctcctacttcggggaggacctgatgccgtga

SEQ ID NO: 8881 - RNA, 2214 nt, synthetic construct
  misc_feature 1..2214: note = derived and/or modified sequence opt2 fromKPCE__Homo_sapiens__AAI09034
  source 1..2214: mol_type = other RNA
atggtcgtcttcaacggcctcctcaagatcaagatctgcgaggccgtctccctcaagcccaccgcctggtccctccgccacgccgtcggcccccgcccccagaccttcctcctcgacccctacatcgccctcaacgtcgacgactcccgcatcggccagaccgccaccaagcagaagaccaactcccccgcctggcacgacgagttcgtcaccgacgtctgcaacggccgcaagatcgagctcgccgtcttccacgacgcccccatcggctacgacgacttcgtcgccaactgcaccatccagttcgaggagctcctccagaacggctcccgccacttcgaggactggatcgacctcgagcccgagggccgcgtctacgtcatcatcgacctctccggctcctccggcgaggcccccaaggacaacgaggagcgcgtcttccgcgagcgcatgcgcccccgcaagcgccagggcgccgtccgccgccgcgtccaccaggtcaacggccacaagttcatggccacctacctccgccagcccacctactgctcccactgccgcgacttcatctggggcgtcatcggcaagcagggctaccagtgccaggtctgcacctgcgtcgtccacaagcgctgccacgagctcatcatcaccaagtgcgccggcctcaagaagcaggagacccccgaccaggtcggctcccagcgcttctccgtcaacatgccccacaagttcggcatccacaactacaaggtccccaccttctgcgaccactgcggctccctcctctggggcctcctccgccagggcctccagtgcaaggtctgcaagatgaacgtccaccgccgctgcgagaccaacgtcgcccccaactgcggcgtcgacgcccgcggcatcgccaaggtcctcgccgacctcggcgtcacccccgacaagatcaccaactccggccagcgccgcaagaagctcatcgccggcgccgagtccccccagcccgcctccggctcctccccctccgaggaggaccgctccaagtccgcccccacctccccctgcgaccaggagatcaaggagctcgagaacaacatccgcaaggccctctccttcgacaaccgcggcgaggagcaccgcgccgcctcctcccccgacggccagctcatgtcccccggcgagaacggcgaggtccgccagggccaggccaagcgcctcggcctcgacgagttcaacttcatcaaggtcctcggcaagggctccttcggcaaggtcatgctcgccgagctcaagggcaaggacgaggtctacgccgtcaaggtcctcaagaaggacgtcatcctccaggacgacgacgtcgactgcaccatgaccgagaagcgcatcctcgccctcgcccgcaagcacccctacctcacccagctctactgctgcttccagaccaaggaccgcctcttcttcgtcatggagtacgtcaacggcggcgacctcatgttccagatccagcgctcccgcaagttcgacgagccccgctcccgcttctacgccgccgaggtcacctccgccctcatgttcctccaccagcacggcgtcatctaccgcgacctcaagctcgacaacatcctcctcgacgccgagggccactgcaagctcgccgacttcggcatgtgcaaggagggcatcctcaacggcgtcaccaccaccaccttctgcggcacccccgactacatcgcccccgagatcctccaggagctcgagtacggcccctccgtcgactggtgggccctcggcgtcctcatgtacgagatgatggccggccagccccccttcgaggccgacaacgaggacgacctcttcgagtccatcctccacgacgacgtcctctaccccgtctggctctccaaggaggccgtctccatcctcaaggccttcatgaccaagaacccccacaagcgcctcggctgcgtcgcctcccagaacggcgaggacgccatcaagcagcaccccttcttcaaggagatcgactgggtcctcctcgagcagaagaagatcaagccccccttcaagccccgcatcaagaccaagcgcgacgtcaacaacttcgaccaggacttcacccgcgaggagcccgtcctcaccctcgtcgacgaggccatcgtcaagcagatcaaccaggaggagttcaagggcttctcctacttcggcgaggacctcatgccctga

SEQ ID NO: 8882 - RNA, 2214 nt, synthetic construct
  misc_feature 1..2214: note = derived and/or modified sequence opt3 fromKPCE__Homo_sapiens__AAI09034
  source 1..2214: mol_type = other RNA
atggtggtcttcaacggcctgctcaagatcaaaatttgcgaggccgttagccttaagcccaccgcttggtccctgagacacgcagtggggcctaggccacagacatttttgttagacccgtacatagccctgaatgtagatgactctcggatcggacaaactgcgacgaaacagaagaccaactcacccgcttggcatgatgagttcgtgacagacgtctgtaatggtcgcaaaattgagctagccgtgtttcacgatgcacctatcggctatgacgatttcgttgccaactgcactattcagtttgaagaactcctgcagaatgggagtcgacatttcgaagactggatcgatcttgagccagagggacgtgtgtacgtcataatcgacctgagcggctcctctggtgaagctcccaaggataacgaggaaagagtgtttagggagcggatgcgccctagaaagaggcaaggggcagtacggcgccgagttcaccaggtgaatggacataaattcatggccacctatttgagacagccaacatactgttcgcactgcagggactttatttggggcgtcatcggcaagcaggggtatcaatgtcaggtgtgcacctgtgtggtccacaaacggtgccatgagctcattatcactaagtgtgctggactgaaaaagcaggaaacacccgatcaggttggttcacaacgtttcagcgtgaacatgcctcacaagtttggcatacataattacaaagtaccaaccttctgcgaccactgtgggagtctgctctggggattactgcgccagggccttcagtgcaaggtgtgcaaaatgaacgtccacagaaggtgtgagacgaatgtggccccgaactgcggtgttgacgcgcgggggattgcaaaggtgttggccgatctgggagtcactcccgacaaaatcaccaattccggccaacgacgcaagaaactaattgctggcgccgaatctcctcagccagcaagcgggtcctcacccagtgaggaagatagaagcaagtctgctcctacatccccatgtgaccaggagatcaaggagctcgaaaacaatatcaggaaagccctgtcatttgataaccggggagaggaacatcgcgcggccagcagtcccgacggtcagcttatgtctccgggcgagaacggggaagtgagacaaggacaggcaaagaggctgggcttggatgagttcaatttcattaaagtactcggtaaggggtcctttggcaaagttatgctggctgagttaaagggaaaggacgaagtgtatgccgtcaaagtgctgaagaaagatgtcatactccaggacgatgacgtggactgcactatgaccgagaagcgtatccttgctctggcccggaaacacccttacttgacacagctatactgttgcttccaaaccaaggatcgactgtttttcgttatggaatatgtgaacggcggggacctcatgtttcagattcagagaagcaggaagttcgatgagccccgctcgcggttttacgcagccgaagtaacgtctgctctgatgttccttcatcagcacggagtcatctatagagacctgaaattggataatatactcctggacgcggagggtcattgtaagttagcagattttggcatgtgcaaagaggggattctgaacggagtgactacaaccactttctgtggcacaccagactacatcgcccctgaaatcctacaagagctcgaatatggtccctccgttgattggtgggctctgggggtgcttatgtacgagatgatggccggccagccaccctttgaggcagacaatgaagatgacttgttcgagtcaattctgcacgatgacgtcctctatcctgtgtggctgagtaaggaagccgtaagcatccttaaggcttttatgaccaaaaacccacacaagaggctgggatgcgtggcctcccagaatggcgaggacgcaattaaacagcatccgttcttcaaggaaatagattgggttttgctcgagcagaaaaagatcaaacccccttttaagccacgcattaaaacgaagcgagacgtcaacaatttcgatcaagactttacccgggaggaacccgtgctgacattagtggatgaggcgatcgtcaagcagatcaaccaagaagagttcaaagggttttcttacttcggagaagacctgatgccttga

SEQ ID NO: 8883 - RNA, 2214 nt, synthetic construct
  misc_feature 1..2214: note = derived and/or modified sequence opt4 fromKPCE__Homo_sapiens__AAI09034
  source 1..2214: mol_type = other RNA
atggtggtgttcaacggcctgctgaagatcaagatctgcgaggccgtgagcctgaagcccaccgcctggagcctgagacacgccgtgggccccagaccccagaccttcctgctggacccctacatcgccctgaacgtggacgacagcagaatcggccagaccgccaccaagcagaagaccaacagccccgcctggcacgacgagttcgtgaccgacgtgtgcaacggcagaaagatcgagctggccgtgttccacgacgcccccatcggctacgacgacttcgtggccaactgcaccatccagttcgaggagctgctgcagaacggcagcagacacttcgaggactggatcgacctggagcccgagggcagagtgtacgtgatcatcgacctgagcggcagcagcggcgaggcccccaaggacaacgaggagagagtgttcagagagagaatgagacccagaaagagacagggcgccgtgagaagaagagtgcaccaggtgaacggccacaagttcatggccacctacctgagacagcccacctactgcagccactgcagagacttcatctggggcgtgatcggcaagcagggctaccagtgccaggtgtgcacctgcgtggtgcacaagagatgccacgagctgatcatcaccaagtgcgccggcctgaagaagcaggagacccccgaccaggtgggcagccagagattcagcgtgaacatgccccacaagttcggcatccacaactacaaggtgcccaccttctgcgaccactgcggcagcctgctgtggggcctgctgagacagggcctgcagtgcaaggtgtgcaagatgaacgtgcacagaagatgcgagaccaacgtggcccccaactgcggcgtggacgccagaggcatcgccaaggtgctggccgacctgggcgtgacccccgacaagatcaccaacagcggccagagaagaaagaagctgatcgccggcgccgagagcccccagcccgccagcggcagcagccccagcgaggaggacagaagcaagagcgcccccaccagcccctgcgaccaggagatcaaggagctggagaacaacatcagaaaggccctgagcttcgacaacagaggcgaggagcacagagccgccagcagccccgacggccagctgatgagccccggcgagaacggcgaggtgagacagggccaggccaagagactgggcctggacgagttcaacttcatcaaggtgctgggcaagggcagcttcggcaaggtgatgctggccgagctgaagggcaaggacgaggtgtacgccgtgaaggtgctgaagaaggacgtgatcctgcaggacgacgacgtggactgcaccatgaccgagaagagaatcctggccctggccagaaagcacccctacctgacccagctgtactgctgcttccagaccaaggacagactgttcttcgtgatggagtacgtgaacggcggcgacctgatgttccagatccagagaagcagaaagttcgacgagcccagaagcagattctacgccgccgaggtgaccagcgccctgatgttcctgcaccagcacggcgtgatctacagagacctgaagctggacaacatcctgctggacgccgagggccactgcaagctggccgacttcggcatgtgcaaggagggcatcctgaacggcgtgaccaccaccaccttctgcggcacccccgactacatcgcccccgagatcctgcaggagctggagtacggccccagcgtggactggtgggccctgggcgtgctgatgtacgagatgatggccggccagccccccttcgaggccgacaacgaggacgacctgttcgagagcatcctgcacgacgacgtgctgtaccccgtgtggctgagcaaggaggccgtgagcatcctgaaggccttcatgaccaagaacccccacaagagactgggctgcgtggccagccagaacggcgaggacgccatcaagcagcaccccttcttcaaggagatcgactgggtgctgctggagcagaagaagatcaagccccccttcaagcccagaatcaagaccaagagagacgtgaacaacttcgaccaggacttcaccagagaggagcccgtgctgaccctggtggacgaggccatcgtgaagcagatcaaccaggaggagttcaagggcttcagctacttcggcgaggacctgatgccctga

SEQ ID NO: 8884 - RNA, 2214 nt, synthetic construct
  misc_feature 1..2214: note = derived and/or modified sequence opt5 fromKPCE__Homo_sapiens__AAI09034
  source 1..2214: mol_type = other RNA
atggtggtcttcaacggcctgctcaagatcaaaatttgcgaggccgttagcctgaagcccaccgcttggtcccttagacacgccgtggggcctcggccgcagacatttctgctcgacccctacatcgcgctgaatgtggatgactctcgcattggacaaacggctaccaaacagaagacaaacagccctgcctggcatgatgagttcgtcaccgacgtgtgtaatggcagaaaaatcgagcttgccgtttttcacgatgctcccattgggtatgacgatttcgtggccaactgcacaatccagtttgaagaactgctccagaatggatcccggcatttcgaagactggatcgatctggagcctgagggccgcgtctacgtgattatcgacctgtctgggagctccggagaagctcccaaggataacgaggaaagagtttttcgggagcgcatgagacctcggaagcgccaaggcgccgtgagacggcgcgtccaccaggtgaatggccataaattcatggcgacctatctcagacagccgacatactgttctcactgccgggactttatttggggagtgatcgggaagcagggctatcaatgtcaggtctgcacctgtgttgtgcacaaacgctgccatgagctgattatcacgaagtgtgccgggcttaaaaagcaggaaacccccgatcaggtgggaagccaaagattctccgtcaacatgcctcacaagtttggcattcataattacaaagtgcccacattctgcgaccactgtgggagcctgctctggggactgcttcggcagggcctgcagtgcaaggtttgcaaaatgaacgtgcacagacgctgtgagaccaatgtcgctcctaactgcggcgtggacgcccgggggatcgctaaggttctcgccgatctgggagtgacacccgacaaaatcaccaattctggccaaagacgcaagaaactgattgcgggggccgaatccccgcagcctgctagcggatcttcccccagcgaggaagatcggtctaagtccgcccctacgagcccctgtgaccaggagatcaaggagctcgaaaacaatattagaaaagctctgtcctttgataaccgcggcgaggaacatcgggccgcctctagccccgacgggcagcttatgtcccctggagagaacggcgaagtcagacaaggccaggctaagcgcctggggctcgatgagttcaatttcatcaaagtgctgggaaagggcagctttgggaaagtcatgcttgcggagctgaagggaaaggacgaagtgtatgccgttaaagtgctcaagaaagatgtcattctgcaggacgatgacgtggactgcacaatgaccgagaagcggatcctggctctcgccagaaaacacccgtacctgacacagctttactgttgcttccaaaccaaggatcgcctgtttttcgttatggaatatgtgaacggcggggacctcatgtttcagatccagcggtctagaaagttcgatgagccccggtcccgcttttacgccgctgaagtcaccagcgccctgatgttccttcatcagcacggcgtgatttatagagacctgaaactcgataatatcctgctggacgcggagggacattgtaagctcgctgattttggcatgtgcaaagaggggattctgaacggagtgacaacgaccacattctgtggcacccctgactacatcgcccccgaaattcttcaagagctggaatatgggccttctgttgattggtgggccctcggagtcctgatgtacgagatgatggctggccagcccccgtttgaggccgacaatgaagatgacctgttcgagagcatccttcacgatgacgtgctctatcctgtgtggctgtccaaggaagctgtctctatcctgaaagcctttatgacaaagaacccccacaagcggctcgggtgcgtggcgagccagaatggcgaggacgccattaaacagcatcctttcttcaaggaaatcgattgggttctgcttgagcagaaaaagattaaacccccttttaagcccagaatcaaaaccaagcgcgacgtgaacaatttcgatcaagactttacgcgggaggaaccggtcctgacactcgtggatgaggctattgttaagcagatcaaccaagaagagttcaaaggattttcctacttcggcgaagacctgatgccttga

SEQ ID NO: 8885 - protein, 697 aa, synthetic construct
  REGION 1..697: note = KPCG__Homo_sapiens__P05129
MAGLGPGVGDSEGGPRPLFCRKGALRQKVVHEVKSHKFTARFFKQPTFCSHCTDFIWGIGKQGLQCQVCSFVVHRRCHEFVTFECPGAGKGPQTDDPRNKHKFRLHSYSSPTFCDHCGSLLYGLVHQGMKCSCCEMNVHRRCVRSVPSLCGVDHTERRGRLQLEIRAPTADEIHVTVGEARNLIPMDPNGLSDPYVKLKLIPDPRNLTKQKTRTVKATLNPVWNETFVFNLKPGDVERRLSVEVWDWDRTSRNDFMGAMSFGVSELLKAPVDGWYKLLNQEEGEYYNVPVADADNCSLLQKFEACNYPLELYERVRMGPSSSPIPSPSPSPTDPKRCFFGASPGRLHISDFSFLMVLGKGSFGKVMLAERRGSDELYAIKILKKDVIVQDDDVDCTLVEKRVLALGGRGPGGRPHFLTQLHSTFQTPDRLYFVMEYVTGGDLMYHIQQLGKFKEPHAAFYAAEIAIGLFFLHNQGIIYRDLKLDNVMLDAEGHIKITDFGMCKENVFPGTTTRTFCGTPDYIAPEIIAYQPYGKSVDWWSFGVLLYEMLAGQPPFDGEDEEELFQAIMEQTVTYPKSLSREAVAICKGFLTKHPGKRLGSGPDGEPTIRAHGFFRWIDWERLERLEIPPPFRPRPCGRSGENFDKFFTRAAPALTPPDRLVLASIDQADFQGFTYVNPDFVHPDARSPTSPVPVPVM

SEQ ID NO: 8886 - RNA, 2094 nt, synthetic construct
  misc_feature 1..2094: note = KPCG__Homo_sapiens__AAH47876
  source 1..2094: mol_type = other RNA
atggctggtctgggccccggcgtaggcgattcagaggggggaccccggcccctgttttgcagaaagggggccctgaggcagaaggtggtccacgaagtcaagagccacaagttcaccgctcgcttcttcaagcagcccaccttctgcagccactgcaccgacttcatctggggtatcggaaagcagggcctgcaatgtcaagtctgcagctttgtggttcatcgacgatgccacgaatttgtgaccttcgagtgtccaggcgctgggaagggcccccagacggatgacccccggaacaaacacaagttccgcctgcatagctacagcagccccaccttctgcgaccactgtggctccctcctctacgggcttgtgcaccagggcatgaaatgctcctgctgcgagatgaacgtgcaccggcgctgtgtgcgtagcgtgccctccctgtgcggtgtggaccacaccgagcgccgcgggcgcctgcagctggagatccgggctcccacagcagatgagatccacgtaactgttggcgaggcccgtaacctaattcctatggaccccaatggtctctctgatccctatgtgaaactgaagctcatcccagaccctcggaacctgacgaaacagaagacccgaacggtgaaagccacgctaaaccctgtgtggaatgagacctttgtgttcaacctgaagccaggggatgtggagcgccggctcagcgtggaggtgtgggactgggaccggacctcccgcaacgacttcatgggggccatgtcctttggcgtctcggagctgctcaaggcgcccgtggatggctggtacaagttactgaaccaggaggagggcgagtattacaatgtgccggtggccgatgctgacaactgcagcctcctccagaagtttgaggcttgtaactaccccctggaattgtatgagcgggtgcggatgggcccctcttcctctcccatcccctccccttcccctagtcccaccgaccccaagcgctgcttcttcggggcgagtccaggacgcctgcacatctccgacttcagcttcctcatggttctaggaaaaggcagttttgggaaggtgatgctggccgagcgcaggggctctgatgagctctacgccatcaagatcttgaaaaaggacgtgatcgtccaggacgacgatgtggactgcacgctggtggagaaacgtgtgctggcgctggggggccggggtcctggcggccggccccacttcctcacccagctccactccaccttccagaccccggaccgcctgtatttcgtgatggagtacgtcaccgggggagacttgatgtaccacattcaacagctgggcaagtttaaggagccccatgcagcgttctacgcggcagaaatcgctatcggcctcttcttccttcacaatcagggcatcatctacagggacctgaagctggacaatgtgatgctggatgctgagggacacatcaagatcactgactttggcatgtgtaaggagaacgtcttccccgggacgacaacccgcaccttctgcgggaccccggactacatagccccggagatcattgcctaccagccctatgggaagtctgtcgattggtggtcctttggagttctgctgtatgagatgttggcaggacagcctcccttcgatggggaggacgaggaggagctgtttcaggccatcatggaacaaactgtcacctaccccaagtcgctttcccgggaagccgtggccatctgcaaggggttcctgaccaagcacccagggaagcgcctgggctcagggcctgatggggaacctaccatccgtgcacatggctttttccgctggattgactgggagcggctggaacgattggagatcccgcctcctttcagaccccgcccgtgtggccgcagcggcgagaactttgacaagttcttcacgcgggcggcgccagcgctgacccctccagaccgcctagtcctggccagcatcgaccaggccgatttccagggcttcacctacgtgaaccccgacttcgtgcacccggatgcccgcagccccaccagcccagtgcctgtgcccgtcatgtaa

SEQ ID NO: 8887 - RNA, 2094 nt, synthetic construct
  misc_feature 1..2094: note = derived and/or modified sequence opt1 fromKPCG__Homo_sapiens__AAH47876
  source 1..2094: mol_type = other RNA
atggccggcctggggcccggcgtgggggacagcgagggcgggccgcgccccctcttctgccggaagggcgccctgcgccagaaggtcgtgcacgaggtgaagtcccacaagttcaccgcgcggttcttcaagcagcccaccttctgcagccactgcacggacttcatctggggcatcgggaagcagggcctgcagtgccaggtctgctccttcgtggtgcaccgccggtgccacgagttcgtcaccttcgagtgccccggggccggcaaggggccgcagaccgacgacccccgcaacaagcacaagttccggctccacagctactccagccccaccttctgcgaccactgcggctccctgctgtacggcctcgtgcaccaggggatgaagtgcagctgctgcgagatgaacgtgcaccgccggtgcgtccgctccgtgcccagcctgtgcggcgtggaccacacggagcggcgcgggcggctgcagctcgagatccgcgccccgaccgccgacgagatccacgtcaccgtgggcgaggcccggaacctgatccccatggaccccaacggcctgtccgacccctacgtgaagctcaagctgatcccggacccccgcaacctgaccaagcagaagacgcggaccgtcaaggcgaccctcaaccccgtgtggaacgagaccttcgtgttcaacctgaagcccggggacgtcgagcgccggctgagcgtggaggtgtgggactgggaccgcacgtcccggaacgacttcatgggcgccatgagcttcggggtctccgagctcctgaaggccccggtggacggctggtacaagctgctcaaccaggaggagggggagtactacaacgtgcccgtcgccgacgcggacaactgcagcctgctgcagaagttcgaggcctgcaactaccccctcgagctgtacgagcgcgtgcgcatgggcccctccagctccccgatccccagccccagcccctccccgaccgaccccaagcggtgcttcttcggcgccagccccgggcgcctgcacatctccgacttcagcttcctcatggtcctgggcaaggggtccttcggcaaggtgatgctggccgagcggcgcgggagcgacgagctctacgccatcaagatcctgaagaaggacgtgatcgtccaggacgacgacgtggactgcaccctggtggagaagcgggtcctcgcgctgggcggccgcgggcccggcgggcggccgcacttcctgacccagctccactccacgttccagacccccgaccgcctgtacttcgtgatggagtacgtgaccggcggggacctgatgtaccacatccagcagctcggcaagttcaaggagccccacgccgccttctacgccgccgagatcgcgatcggcctgttcttcctgcacaaccaggggatcatctaccgggacctcaagctggacaacgtcatgctggacgccgagggccacatcaagatcaccgacttcgggatgtgcaaggagaacgtgttcccgggcacgaccacccgcaccttctgcggcacgcccgactacatcgcccccgagatcatcgcctaccagccctacggcaagagcgtggactggtggtccttcggggtcctcctgtacgagatgctggccgggcagccgcccttcgacggcgaggacgaggaggagctgttccaggcgatcatggagcagaccgtgacctaccccaagagcctctcccgggaggccgtggccatctgcaaggggttcctgaccaagcaccccggcaagcgcctgggcagcgggccggacggcgagcccacgatccgggcccacgggttcttccgctggatcgactgggagcggctcgagcgcctggagatcccgccgcccttccggccccgcccctgcggccggtccggggagaacttcgacaagttcttcacccgcgccgcgcccgccctgaccccgcccgaccgcctcgtcctggccagcatcgaccaggccgacttccagggcttcacctacgtgaaccccgacttcgtgcaccccgacgcgcggtcccccacgagccccgtccccgtgcccgtgatgtga

SEQ ID NO: 8888 - RNA, 2094 nt, synthetic construct
  misc_feature 1..2094: note = derived and/or modified sequence opt2 fromKPCG__Homo_sapiens__AAH47876
  source 1..2094: mol_type = other RNA
atggccggcctcggccccggcgtcggcgactccgagggcggcccccgccccctcttctgccgcaagggcgccctccgccagaaggtcgtccacgaggtcaagtcccacaagttcaccgcccgcttcttcaagcagcccaccttctgctcccactgcaccgacttcatctggggcatcggcaagcagggcctccagtgccaggtctgctccttcgtcgtccaccgccgctgccacgagttcgtcaccttcgagtgccccggcgccggcaagggcccccagaccgacgacccccgcaacaagcacaagttccgcctccactcctactcctcccccaccttctgcgaccactgcggctccctcctctacggcctcgtccaccagggcatgaagtgctcctgctgcgagatgaacgtccaccgccgctgcgtccgctccgtcccctccctctgcggcgtcgaccacaccgagcgccgcggccgcctccagctcgagatccgcgcccccaccgccgacgagatccacgtcaccgtcggcgaggcccgcaacctcatccccatggaccccaacggcctctccgacccctacgtcaagctcaagctcatccccgacccccgcaacctcaccaagcagaagacccgcaccgtcaaggccaccctcaaccccgtctggaacgagaccttcgtcttcaacctcaagcccggcgacgtcgagcgccgcctctccgtcgaggtctgggactgggaccgcacctcccgcaacgacttcatgggcgccatgtccttcggcgtctccgagctcctcaaggcccccgtcgacggctggtacaagctcctcaaccaggaggagggcgagtactacaacgtccccgtcgccgacgccgacaactgctccctcctccagaagttcgaggcctgcaactaccccctcgagctctacgagcgcgtccgcatgggcccctcctcctcccccatcccctccccctccccctcccccaccgaccccaagcgctgcttcttcggcgcctcccccggccgcctccacatctccgacttctccttcctcatggtcctcggcaagggctccttcggcaaggtcatgctcgccgagcgccgcggctccgacgagctctacgccatcaagatcctcaagaaggacgtcatcgtccaggacgacgacgtcgactgcaccctcgtcgagaagcgcgtcctcgccctcggcggccgcggccccggcggccgcccccacttcctcacccagctccactccaccttccagacccccgaccgcctctacttcgtcatggagtacgtcaccggcggcgacctcatgtaccacatccagcagctcggcaagttcaaggagccccacgccgccttctacgccgccgagatcgccatcggcctcttcttcctccacaaccagggcatcatctaccgcgacctcaagctcgacaacgtcatgctcgacgccgagggccacatcaagatcaccgacttcggcatgtgcaaggagaacgtcttccccggcaccaccacccgcaccttctgcggcacccccgactacatcgcccccgagatcatcgcctaccagccctacggcaagtccgtcgactggtggtccttcggcgtcctcctctacgagatgctcgccggccagccccccttcgacggcgaggacgaggaggagctcttccaggccatcatggagcagaccgtcacctaccccaagtccctctcccgcgaggccgtcgccatctgcaagggcttcctcaccaagcaccccggcaagcgcctcggctccggccccgacggcgagcccaccatccgcgcccacggcttcttccgctggatcgactgggagcgcctcgagcgcctcgagatccccccccccttccgcccccgcccctgcggccgctccggcgagaacttcgacaagttcttcacccgcgccgcccccgccctcaccccccccgaccgcctcgtcctcgcctccatcgaccaggccgacttccagggcttcacctacgtcaaccccgacttcgtccaccccgacgcccgctcccccacctcccccgtccccgtccccgtcatgtga

SEQ ID NO: 8889 - RNA, 2094 nt, synthetic construct
  misc_feature 1..2094: note = derived and/or modified sequence opt3 fromKPCG__Homo_sapiens__AAH47876
  source 1..2094: mol_type = other RNA
atggccggcctggggcccggagtgggtgacagcgagggcgggcctagaccactcttctgcaggaagggagctctacggcagaaagtcgttcacgaagtgaagtcccataaatttactgcacgcttctttaagcaaccgacattctgttctcactgcactgattttatctggggcattggtaaacaggggctgcagtgtcaggtatgctcattcgtggtccatcgacgttgtcacgagtttgtgacgttcgaatgccccggagccggcaagggccctcaaaccgacgatccaagaaacaagcataaatttaggttgcacagttacagctcccccacattctgtgaccactgcgggtctttactgtatggacttgttcatcagggtatgaagtgttcgtgctgtgagatgaatgtgcaccggcgctgcgtcagatcagtgcctagcctctgcggcgtagatcatactgaaaggcgggggcgcctgcagcttgagatacgagcgccaaccgctgacgagatccacgttacagtgggagaagccagaaacctgattcccatggatcctaatggcttgagtgacccatacgtcaaactcaagctgatcccggatcccaggaacctgaccaaacagaagactcggacagtgaaggcaaccctcaatcctgtgtggaacgagacgtttgtcttcaatttaaaaccaggtgacgttgaacgtcgcctgtccgtggaggtatgggattgggacagaacttctaggaacgattttatgggggccatgagcttcggagtgtccgagcttttgaaggctcccgtcgacggctggtataaactgctaaatcaagaagagggcgaatactataacgtgcctgttgcagacgccgataattgttcactcctgcagaagttcgaggcttgcaactacccacttgaactgtatgagcgggtgcgaatggggcccagtagctctccgattccttccccctcaccaagccctaccgaccccaaacgctgctttttcggagccagtccaggtagattgcacatctctgatttttccttcctcatggtcctgggcaaggggagctttggaaaagtgatgttagcggagaggcggggctcggacgaactgtacgcaataaagatcctcaagaaagatgtaattgttcaggacgatgacgtggattgtacacttgtcgagaagcgcgtgctggccttgggtgggagaggccccggaggcaggcctcatttcctaactcagctgcactctacctttcaaacaccagaccgtctctacttcgtcatggaatatgtgaccgggggagatctgatgtaccatatccagcagcttggtaaatttaaggagccgcacgctgccttctatgcagctgaaattgccatcggcctgtttttcttgcataatcaagggataatttaccgggacctcaaactggacaacgttatgttagatgcggagggacacatcaagattacggactttggcatgtgtaaggagaatgtgttccccggtactacaacccgaactttctgcgggacacctgattatatcgccccagaaatcattgcataccagccctatggcaaatccgtagactggtggtcatttggagtcctgctatacgagatgctcgctggccagcctccattcgatggggaagacgaggaggaactgtttcaggccataatggagcaaaccgtgacgtaccccaagagtcttagcagagaagctgttgccatctgtaaaggattcttgaccaagcacccgggtaaaaggctgggctccgggcctgatggagagccaacaattcgcgcacatggctttttccggtggatcgactgggaaagactcgagaggctggagataccccctccctttcgcccacgaccttgcggtcggtctggggaaaacttcgataagtttttcactcgtgccgctcccgcgcttaccccaccggacagactggtgttggcaagcattgatcaggccgactttcagggcttcacatatgtcaaccctgattttgtgcaccccgacgctaggtcaccaaccagtcccgtacctgtgccagttatgtga

SEQ ID NO: 8890 - RNA, 2094 nt, synthetic construct
  misc_feature 1..2094: note = derived and/or modified sequence opt4 fromKPCG__Homo_sapiens__AAH47876
  source 1..2094: mol_type = other RNA
atggccggcctgggccccggcgtgggcgacagcgagggcggccccagacccctgttctgcagaaagggcgccctgagacagaaggtggtgcacgaggtgaagagccacaagttcaccgccagattcttcaagcagcccaccttctgcagccactgcaccgacttcatctggggcatcggcaagcagggcctgcagtgccaggtgtgcagcttcgtggtgcacagaagatgccacgagttcgtgaccttcgagtgccccggcgccggcaagggcccccagaccgacgaccccagaaacaagcacaagttcagactgcacagctacagcagccccaccttctgcgaccactgcggcagcctgctgtacggcctggtgcaccagggcatgaagtgcagctgctgcgagatgaacgtgcacagaagatgcgtgagaagcgtgcccagcctgtgcggcgtggaccacaccgagagaagaggcagactgcagctggagatcagagcccccaccgccgacgagatccacgtgaccgtgggcgaggccagaaacctgatccccatggaccccaacggcctgagcgacccctacgtgaagctgaagctgatccccgaccccagaaacctgaccaagcagaagaccagaaccgtgaaggccaccctgaaccccgtgtggaacgagaccttcgtgttcaacctgaagcccggcgacgtggagagaagactgagcgtggaggtgtgggactgggacagaaccagcagaaacgacttcatgggcgccatgagcttcggcgtgagcgagctgctgaaggcccccgtggacggctggtacaagctgctgaaccaggaggagggcgagtactacaacgtgcccgtggccgacgccgacaactgcagcctgctgcagaagttcgaggcctgcaactaccccctggagctgtacgagagagtgagaatgggccccagcagcagccccatccccagccccagccccagccccaccgaccccaagagatgcttcttcggcgccagccccggcagactgcacatcagcgacttcagcttcctgatggtgctgggcaagggcagcttcggcaaggtgatgctggccgagagaagaggcagcgacgagctgtacgccatcaagatcctgaagaaggacgtgatcgtgcaggacgacgacgtggactgcaccctggtggagaagagagtgctggccctgggcggcagaggccccggcggcagaccccacttcctgacccagctgcacagcaccttccagacccccgacagactgtacttcgtgatggagtacgtgaccggcggcgacctgatgtaccacatccagcagctgggcaagttcaaggagccccacgccgccttctacgccgccgagatcgccatcggcctgttcttcctgcacaaccagggcatcatctacagagacctgaagctggacaacgtgatgctggacgccgagggccacatcaagatcaccgacttcggcatgtgcaaggagaacgtgttccccggcaccaccaccagaaccttctgcggcacccccgactacatcgcccccgagatcatcgcctaccagccctacggcaagagcgtggactggtggagcttcggcgtgctgctgtacgagatgctggccggccagccccccttcgacggcgaggacgaggaggagctgttccaggccatcatggagcagaccgtgacctaccccaagagcctgagcagagaggccgtggccatctgcaagggcttcctgaccaagcaccccggcaagagactgggcagcggccccgacggcgagcccaccatcagagcccacggcttcttcagatggatcgactgggagagactggagagactggagatccccccccccttcagacccagaccctgcggcagaagcggcgagaacttcgacaagttcttcaccagagccgcccccgccctgaccccccccgacagactggtgctggccagcatcgaccaggccgacttccagggcttcacctacgtgaaccccgacttcgtgcaccccgacgccagaagccccaccagccccgtgcccgtgcccgtgatgtga

SEQ ID NO: 8891 - RNA, 2094 nt, synthetic construct
  misc_feature 1..2094: note = derived and/or modified sequence opt5 fromKPCG__Homo_sapiens__AAH47876
  source 1..2094: mol_type = other RNA
atggccggcctggggcccggagtgggcgacagcgaagggggacctagaccgcttttctgccggaagggcgctctgcgccagaaagtcgttcacgaagtgaagtcccataaatttaccgccagattctttaagcaacccacattctgttctcactgcacggattttatctgggggattggaaaacagggccttcagtgtcaggtgtgcagcttcgtcgtgcatcggcgctgtcacgagtttgttaccttcgaatgccctggcgcggggaagggaccccaaacagacgatcctagaaacaagcataaatttcggctgcactcctactctagccccaccttctgtgaccactgcggctccctcctgtatgggcttgtgcatcagggaatgaagtgttcttgctgtgagatgaatgtccaccgcagatgcgtgcggagcgttccttccctgtgcggcgtggatcatacagaacgcagagggcggctccagctggagatccgcgctccgaccgccgacgagattcacgtcacagtgggagaagccagaaacctgatccccatggatcctaatggcctcagcgacccctacgtgaaactgaagctcattcctgatccccggaacctgaccaaacagaagacgcgcaccgtcaaggctacactcaatccggtttggaacgagacctttgtgttcaatctgaaacctggcgacgtggaaagacggctttctgtcgaggtgtgggattgggacagaacatcccgcaacgattttatgggggccatgagcttcggagtttctgagctgctcaaggctcccgtggacggctggtataaactgctgaatcaagaagagggggaatactataacgtccctgtggccgacgcggataattgttccctcctgcagaagttcgaggcctgcaactacccccttgaactgtatgagcgggttagaatgggaccctctagctcccctatcccgagcccctccccttctcccaccgaccctaaacgctgctttttcggcgctagccccgggcggctccacatctccgattttagcttcctgatggtgcttggaaagggctcttttggcaaagtcatgctggccgagagacgcgggtccgacgaactctacgctattaagatcctgaagaaagatgtgattgtccaggacgatgacgtggattgtacgctggttgagaagcgggtgctcgccctgggaggcagagggccgggaggccgccctcatttccttacacagctgcacagcacctttcaaacacccgaccggctctacttcgtcatggaatatgtgaccgggggcgatctgatgtaccatatccagcagcttggaaaatttaaggagcctcacgcggccttctatgctgccgaaattgctatcggcctgtttttcctccataatcaagggattatctacagagacctgaaactggacaacgttatgctcgatgccgagggacacatcaagattaccgactttggcatgtgtaaggagaatgtgttccccgggacaacgacccgcacattctgcggaacccctgattatatcgcccccgaaattatcgcttaccagccgtatggcaaatctgtcgactggtggagctttggggtgctgctttacgagatgctggcgggccagcctcccttcgatggagaagacgaggaggagctctttcaggccattatggagcaaacagtgacctaccccaagtccctgtctcgggaagctgttgccatctgtaaaggcttcctgacgaagcaccctgggaaaagacttggaagcggcccggatggggagcccacaatccgggcccatggatttttccgctggattgactgggaaagactcgagcggctggagatccctcccccttttagaccccgcccttgcggccggtccggggaaaacttcgataagtttttcaccagagctgcccccgcgctgaccccgcctgaccgcctcgtcctggctagcattgatcaggccgactttcagggcttcacatatgtgaaccccgattttgtgcaccctgacgccagatctcccacctccccggtccctgtgcccgttatgtga

SEQ ID NO: 8892 - protein, 596 aa, synthetic construct
  REGION 1..596: note = KPCI__Homo_sapiens__P41743
MPTQRDSSTMSHTVAGGGSGDHSHQVRVKAYYRGDIMITHFEPSISFEGLCNEVRDMCSFDNEQLFTMKWIDEEGDPCTVSSQLELEEAFRLYELNKDSELLIHVFPCVPERPGMPCPGEDKSIYRRGARRWRKLYCANGHTFQAKRFNRRAHCAICTDRIWGLGRQGYKCINCKLLVHKKCHKLVTIECGRHSLPQEPVMPMDQSSMHSDHAQTVIPYNPSSHESLDQVGEEKEAMNTRESGKASSSLGLQDFDLLRVIGRGSYAKVLLVRLKKTDRIYAMKVVKKELVNDDEDIDWVQTEKHVFEQASNHPFLVGLHSCFQTESRLFFVIEYVNGGDLMFHMQRQRKLPEEHARFYSAEISLALNYLHERGIIYRDLKLDNVLLDSEGHIKLTDYGMCKEGLRPGDTTSTFCGTPNYIAPEILRGEDYGFSVDWWALGVLMFEMMAGRSPFDIVGSSDNPDQNTEDYLFQVILEKQIRIPRSLSVKAASVLKSFLNKDPKERLGCHPQTGFADIQGHPFFRNVDWDMMEQKQVVPPFKPNISGEFGLDNFDSQFTNEPVQLTPDDDDIVRKIDQSEFEGFEYINPLLMSAEECV

SEQ ID NO: 8893 - RNA, 1791 nt, synthetic construct
  misc_feature 1..1791: note = KPCI__Homo_sapiens__EAW78513
  source 1..1791: mol_type = other RNA
atgccgacccagagggacagcagcaccatgtcccacacggtcgcaggcggcggcagcggggaccattcccaccaggtccgggtgaaagcctactaccgcggggatatcatgataacacattttgaaccttccatctcctttgagggcctttgcaatgaggttcgagacatgtgttcttttgacaacgaacagctcttcaccatgaaatggatagatgaggaaggagacccgtgtacagtatcatctcagttggagttagaagaagcctttagactttatgagctaaacaaggattctgaactcttgattcatgtgttcccttgtgtaccagaacgtcctgggatgccttgtccaggagaagataaatccatctaccgtagaggtgcacgccgctggagaaagctttattgtgccaatggccacactttccaagccaagcgtttcaacaggcgtgctcactgtgccatctgcacagaccgaatatggggacttggacgccaaggatataagtgcatcaactgcaaactcttggttcataagaagtgccataaactcgtcacaattgaatgtgggcggcattctttgccacaggaaccagtgatgcccatggatcagtcatccatgcattctgaccatgcacagacagtaattccatataatccttcaagtcatgagagtttggatcaagttggtgaagaaaaagaggcaatgaacaccagggaaagtggcaaagcttcatccagtctaggtcttcaggattttgatttgctccgggtaataggaagaggaagttatgccaaagtactgttggttcgattaaaaaaaacagatcgtatttatgcaatgaaagttgtgaaaaaagagcttgttaatgatgatgaggatattgattgggtacagacagagaagcatgtgtttgagcaggcatccaatcatcctttccttgttgggctgcattcttgctttcagacagaaagcagattgttctttgttatagagtatgtaaatggaggagacctaatgtttcatatgcagcgacaaagaaaacttcctgaagaacatgccagattttactctgcagaaatcagtctagcattaaattatcttcatgagcgagggataatttatagagatttgaaactggacaatgtattactggactctgaaggccacattaaactcactgactacggcatgtgtaaggaaggattacggccaggagatacaaccagcactttctgtggtactcctaattacattgctcctgaaattttaagaggagaagattatggtttcagtgttgactggtgggctcttggagtgctcatgtttgagatgatggcaggaaggtctccatttgatattgttgggagctccgataaccctgaccagaacacagaggattatctcttccaagttattttggaaaaacaaattcgcataccacgttctctgtctgtaaaagctgcaagtgttctgaagagttttcttaataaggaccctaaggaacgattgggttgtcatcctcaaacaggatttgctgatattcagggacacccgttcttccgaaatgttgattgggatatgatggagcaaaaacaggtggtacctccctttaaaccaaatatttctggggaatttggtttggacaactttgattctcagtttactaatgaacctgtccagctcactccagatgacgatgacattgtgaggaagattgatcagtctgaatttgaaggttttgagtatatcaatcctcttttgatgtctgcagaagaatgtgtctga

SEQ ID NO: 8894 - RNA, 1791 nt, synthetic construct
  misc_feature 1..1791: note = derived and/or modified sequence opt1 fromKPCI__Homo_sapiens__EAW78513
  source 1..1791: mol_type = other RNA
atgcccacccagcgcgacagctccaccatgagccacacggtggccggcgggggctccggggaccacagccaccaggtccgggtgaaggcctactaccgcggcgacatcatgatcacccacttcgagccgtccatcagcttcgaggggctgtgcaacgaggtgcgggacatgtgctccttcgacaacgagcagctgttcaccatgaagtggatcgacgaggagggcgacccctgcaccgtcagctcccagctcgagctggaggaggcgttccgcctctacgagctgaacaaggacagcgagctgctcatccacgtgttcccctgcgtgcccgagcggccgggcatgccctgccccggggaggacaagtccatctaccgccggggcgcccgccggtggcgcaagctgtactgcgccaacgggcacacgttccaggccaagcggttcaaccgccgggcccactgcgcgatctgcaccgaccgcatctggggcctggggcggcagggctacaagtgcatcaactgcaagctcctggtccacaagaagtgccacaagctggtgaccatcgagtgcggccgccacagcctcccccaggagccggtgatgcccatggaccagtccagcatgcactccgaccacgcccagaccgtcatcccctacaaccccagctcccacgagagcctggaccaggtgggggaggagaaggaggccatgaacacgcgggagtccggcaaggccagcagctccctggggctccaggacttcgacctgctgcgcgtgatcggccggggcagctacgcgaaggtcctcctggtgcgcctgaagaagaccgaccggatctacgccatgaaggtggtcaagaaggagctcgtgaacgacgacgaggacatcgactgggtgcagaccgagaagcacgtcttcgagcaggcctccaaccacccgttcctggtggggctgcacagctgcttccagaccgagtcccgcctcttcttcgtgatcgagtacgtcaacggcggggacctgatgttccacatgcagcgccagcggaagctgcccgaggagcacgcccgcttctacagcgccgagatctccctcgcgctgaactacctgcacgagcggggcatcatctaccgcgacctcaagctggacaacgtgctgctcgacagcgaggggcacatcaagctgacggactacggcatgtgcaaggagggcctgcggcccggggacaccacctccaccttctgcggcacgcccaactacatcgccccggagatcctccgcggggaggactacggcttcagcgtggactggtgggccctgggggtcctgatgttcgagatgatggccggccggtcccccttcgacatcgtgggcagctccgacaaccccgaccagaacaccgaggactacctcttccaggtcatcctggagaagcagatccgcatcccccggagcctgtccgtgaaggccgcgagcgtgctcaagtccttcctgaacaaggacccgaaggagcgcctggggtgccacccccagaccggcttcgccgacatccaggggcaccccttcttccggaacgtcgactgggacatgatggagcagaagcaggtcgtgcccccgttcaagcccaacatcagcggcgagttcgggctcgacaacttcgactcccagttcaccaacgagcccgtgcagctgacgcccgacgacgacgacatcgtgcgcaagatcgaccagagcgagttcgagggcttcgagtacatcaacccgctgctcatgagcgccgaggagtgcgtgtga

SEQ ID NO: 8895 - RNA, 1791 nt, synthetic construct
  misc_feature 1..1791: note = derived and/or modified sequence opt2 fromKPCI__Homo_sapiens__EAW78513
  source 1..1791: mol_type = other RNA
atgcccacccagcgcgactcctccaccatgtcccacaccgtcgccggcggcggctccggcgaccactcccaccaggtccgcgtcaaggcctactaccgcggcgacatcatgatcacccacttcgagccctccatctccttcgagggcctctgcaacgaggtccgcgacatgtgctccttcgacaacgagcagctcttcaccatgaagtggatcgacgaggagggcgacccctgcaccgtctcctcccagctcgagctcgaggaggccttccgcctctacgagctcaacaaggactccgagctcctcatccacgtcttcccctgcgtccccgagcgccccggcatgccctgccccggcgaggacaagtccatctaccgccgcggcgcccgccgctggcgcaagctctactgcgccaacggccacaccttccaggccaagcgcttcaaccgccgcgcccactgcgccatctgcaccgaccgcatctggggcctcggccgccagggctacaagtgcatcaactgcaagctcctcgtccacaagaagtgccacaagctcgtcaccatcgagtgcggccgccactccctcccccaggagcccgtcatgcccatggaccagtcctccatgcactccgaccacgcccagaccgtcatcccctacaacccctcctcccacgagtccctcgaccaggtcggcgaggagaaggaggccatgaacacccgcgagtccggcaaggcctcctcctccctcggcctccaggacttcgacctcctccgcgtcatcggccgcggctcctacgccaaggtcctcctcgtccgcctcaagaagaccgaccgcatctacgccatgaaggtcgtcaagaaggagctcgtcaacgacgacgaggacatcgactgggtccagaccgagaagcacgtcttcgagcaggcctccaaccaccccttcctcgtcggcctccactcctgcttccagaccgagtcccgcctcttcttcgtcatcgagtacgtcaacggcggcgacctcatgttccacatgcagcgccagcgcaagctccccgaggagcacgcccgcttctactccgccgagatctccctcgccctcaactacctccacgagcgcggcatcatctaccgcgacctcaagctcgacaacgtcctcctcgactccgagggccacatcaagctcaccgactacggcatgtgcaaggagggcctccgccccggcgacaccacctccaccttctgcggcacccccaactacatcgcccccgagatcctccgcggcgaggactacggcttctccgtcgactggtgggccctcggcgtcctcatgttcgagatgatggccggccgctcccccttcgacatcgtcggctcctccgacaaccccgaccagaacaccgaggactacctcttccaggtcatcctcgagaagcagatccgcatcccccgctccctctccgtcaaggccgcctccgtcctcaagtccttcctcaacaaggaccccaaggagcgcctcggctgccacccccagaccggcttcgccgacatccagggccaccccttcttccgcaacgtcgactgggacatgatggagcagaagcaggtcgtcccccccttcaagcccaacatctccggcgagttcggcctcgacaacttcgactcccagttcaccaacgagcccgtccagctcacccccgacgacgacgacatcgtccgcaagatcgaccagtccgagttcgagggcttcgagtacatcaaccccctcctcatgtccgccgaggagtgcgtctga

SEQ ID NO: 8896 - RNA, 1791 nt, synthetic construct
  misc_feature 1..1791: note = derived and/or modified sequence opt3 fromKPCI__Homo_sapiens__EAW78513
  source 1..1791: mol_type = other RNA
atgcccacccagagagacagctccacaatgtctcacactgtggccggcgggggatcaggtgatcatagtcaccaagtcagggttaaggcttactatcggggcgacatcatgattacgcatttcgagcctagcatatcctttgaagggctgtgcaacgaggtgcgcgatatgtgttctttcgacaatgaacagctctttaccatgaaatggatcgatgaggaaggagacccatgcacagtatcgtcacagcttgagctggaggaagcattccgattgtacgagttaaacaaggatagcgaactgctaattcacgtgtttccgtgtgtccccgagcgtcctggcatgccatgccccggtgaggacaaaagtatctatagaaggggagcccggcgctggagaaagctctactgtgcgaatgggcatactttccaggctaaaaggtttaaccggcgcgcccactgcgcaatttgtaccgatcgaatctggggcctgggcagacaagggtataagtgcataaattgtaagctactggtgcacaaaaagtgccataaattggttacaatcgaatgtggaaggcactccctccctcaggagccagtgatgcccatggaccagtctagcatgcattccgatcacgcccagaccgtcattccttacaacccatcaagtcacgaaagcctggaccaagtgggtgaggaaaaggaggctatgaatactcgggagtctggcaaagcatcctcaagcctggggctccaggatttcgacttactgcgtgtaatcggacgcggcagttatgccaaggttcttttggtgagactgaagaaaacagacaggatttacgctatgaaggtcgtgaaaaaggaacttgtgaacgatgacgaggatatcgactgggtccagaccgaaaaacatgtttttgagcaggcctctaatcacccgttcctcgtgggtctgcattcctgctttcaaacggaaagccggcttttctttgtaatagagtacgtgaacgggggagatctgatgttccacatgcagcgacagcgcaagttgcccgaggaacatgcgagattctattcggcagagatttctctcgccctgaattacttacacgaaaggggcatcatttatcgggacctgaaactcgataacgtccttctggactccgagggccacatcaagttgactgattacgggatgtgcaaggaaggactacgccctggtgacaccacatcaactttttgtggcaccccaaattatatcgctcccgagattctgagaggggaggattacggattcagtgtggactggtgggccctcggcgttctgatgtttgaaatgatggcaggtaggagccctttcgacatagtggggtcctctgataacccagaccaaaatacagaggattatctttttcaggtcatcctggaaaaacagattcgtatcccccggagcttgtcagtgaaggctgccagtgtactcaaatccttcctgaacaaggacccgaaagagcgattaggctgccatcctcagaccggatttgcggatatacaaggccaccccttctttagaaacgttgactgggatatgatggagcagaaacaggtggtcccacctttcaagcccaatattagcggggaatttggactggacaacttcgattctcagtttacgaatgagccagtgcaactaactcccgacgatgacgatatcgtcaggaagatcgaccagtcagagttcgaaggtttcgaatacattaaccctctcctgatgagtgccgaggagtgtgtgtga

SEQ ID NO: 8897 - RNA, 1791 nt, synthetic construct
  misc_feature 1..1791: note = derived and/or modified sequence opt4 fromKPCI__Homo_sapiens__EAW78513
  source 1..1791: mol_type = other RNA
atgcccacccagagagacagcagcaccatgagccacaccgtggccggcggcggcagcggcgaccacagccaccaggtgagagtgaaggcctactacagaggcgacatcatgatcacccacttcgagcccagcatcagcttcgagggcctgtgcaacgaggtgagagacatgtgcagcttcgacaacgagcagctgttcaccatgaagtggatcgacgaggagggcgacccctgcaccgtgagcagccagctggagctggaggaggccttcagactgtacgagctgaacaaggacagcgagctgctgatccacgtgttcccctgcgtgcccgagagacccggcatgccctgccccggcgaggacaagagcatctacagaagaggcgccagaagatggagaaagctgtactgcgccaacggccacaccttccaggccaagagattcaacagaagagcccactgcgccatctgcaccgacagaatctggggcctgggcagacagggctacaagtgcatcaactgcaagctgctggtgcacaagaagtgccacaagctggtgaccatcgagtgcggcagacacagcctgccccaggagcccgtgatgcccatggaccagagcagcatgcacagcgaccacgcccagaccgtgatcccctacaaccccagcagccacgagagcctggaccaggtgggcgaggagaaggaggccatgaacaccagagagagcggcaaggccagcagcagcctgggcctgcaggacttcgacctgctgagagtgatcggcagaggcagctacgccaaggtgctgctggtgagactgaagaagaccgacagaatctacgccatgaaggtggtgaagaaggagctggtgaacgacgacgaggacatcgactgggtgcagaccgagaagcacgtgttcgagcaggccagcaaccaccccttcctggtgggcctgcacagctgcttccagaccgagagcagactgttcttcgtgatcgagtacgtgaacggcggcgacctgatgttccacatgcagagacagagaaagctgcccgaggagcacgccagattctacagcgccgagatcagcctggccctgaactacctgcacgagagaggcatcatctacagagacctgaagctggacaacgtgctgctggacagcgagggccacatcaagctgaccgactacggcatgtgcaaggagggcctgagacccggcgacaccaccagcaccttctgcggcacccccaactacatcgcccccgagatcctgagaggcgaggactacggcttcagcgtggactggtgggccctgggcgtgctgatgttcgagatgatggccggcagaagccccttcgacatcgtgggcagcagcgacaaccccgaccagaacaccgaggactacctgttccaggtgatcctggagaagcagatcagaatccccagaagcctgagcgtgaaggccgccagcgtgctgaagagcttcctgaacaaggaccccaaggagagactgggctgccacccccagaccggcttcgccgacatccagggccaccccttcttcagaaacgtggactgggacatgatggagcagaagcaggtggtgccccccttcaagcccaacatcagcggcgagttcggcctggacaacttcgacagccagttcaccaacgagcccgtgcagctgacccccgacgacgacgacatcgtgagaaagatcgaccagagcgagttcgagggcttcgagtacatcaaccccctgctgatgagcgccgaggagtgcgtgtga

SEQ ID NO: 8898 - RNA, 1791 nt, synthetic construct
  misc_feature 1..1791: note = derived and/or modified sequence opt5 fromKPCI__Homo_sapiens__EAW78513
  source 1..1791: mol_type = other RNA
atgcccacccagagagacagctccacaatgtctcacacggtggccggcgggggaagcggcgatcattcccaccaagtccgggttaaggcttactatcgcggggacatcatgattacccatttcgagccttctatcagctttgaaggactgtgcaacgaggtgagagatatgtgttccttcgacaatgaacagctctttacaatgaaatggattgatgaggaaggcgacccgtgcaccgtgtctagccagctggagcttgaggaagccttccggctgtacgagctcaacaaggattccgaactgcttatccacgtctttccctgtgtgcctgagcgccccgggatgccttgccccggagaggacaaaagcatttatagacggggcgcgcgcagatggcggaagctgtactgtgctaatggccatacattccaggccaaacgctttaacagacgggcccactgcgctatctgtaccgatcgcatctgggggctcggaagacaaggctataagtgcattaattgtaagctgctggttcacaaaaagtgccataaactcgtgacaatcgaatgtgggcggcactctctgcctcaggagccggtcatgcccatggaccagtccagcatgcattctgatcacgcccagaccgtgattccttacaacccctccagccacgaatctcttgaccaagttggagaggaaaaggaggctatgaatacgcgcgagtccggcaaagccagctcctctctggggctccaggatttcgacctgcttagagtgatcggacggggcagctatgcgaaggtcctgctcgtgagactgaagaaaaccgaccgcatttacgccatgaaggtggtcaaaaaggaactggttaacgatgacgaggatatcgactgggtgcagacagaaaaacatgtgtttgagcaggcttccaatcaccctttcctcgtcggcctgcatagctgctttcaaaccgaatctcggcttttctttgtgattgagtacgttaacgggggagatctgatgttccacatgcagagacagcgcaagctccccgaggaacatgcccggttctattccgctgagatcagcctggcccttaattacctgcacgaaagaggcatcatttatcgcgacctcaaactggataacgtgctgctcgactctgaggggcacatcaagctgacagattacggaatgtgcaaggaaggccttcggccgggggacaccacgagcacattttgtggaacccctaattatattgcgcccgagatcctgagaggcgaggattacggcttctccgtcgactggtgggccctcggggtgctgatgtttgaaatgatggctggacgctctcctttcgacattgttggcagctccgataaccccgaccaaaatacagaggattatctttttcaggtgatcctggaaaaacagatccggattcccagaagcctctctgtcaaggccgcttccgtgctgaaatctttcctgaacaaggaccctaaagagcgcctcgggtgccatccgcagaccggatttgccgatatccaaggccaccccttctttcggaacgtcgactgggatatgatggagcagaaacaggtggttcctcccttcaagcctaatattagcggggaatttggcctggacaacttcgattcccagtttaccaatgagcccgtgcaacttacaccggacgatgacgatatcgtcagaaagattgaccagagcgagttcgaaggattcgaatacatcaaccctctgctcatgtccgccgaggagtgtgtgtga

SEQ ID NO: 8899 - protein, 683 aa, synthetic construct
  REGION 1..683: note = KPCL__Homo_sapiens__P24723
MSSGTMKFNGYLRVRIGEAVGLQPTRWSLRHSLFKKGHQLLDPYLTVSVDQVRVGQTSTKQKTNKPTYNEEFCANVTDGGHLELAVFHETPLGYDHFVANCTLQFQELLRTTGASDTFEGWVDLEPEGKVFVVITLTGSFTEATLQRDRIFKHFTRKRQRAMRRRVHQINGHKFMATYLRQPTYCSHCREFIWGVFGKQGYQCQVCTCVVHKRCHHLIVTACTCQNNINKVDSKIAEQRFGINIPHKFSIHNYKVPTFCDHCGSLLWGIMRQGLQCKICKMNVHIRCQANVAPNCGVNAVELAKTLAGMGLQPGNISPTSKLVSRSTLRRQGKESSKEGNGIGVNSSNRLGIDNFEFIRVLGKGSFGKVMLARVKETGDLYAVKVLKKDVILQDDDVECTMTEKRILSLARNHPFLTQLFCCFQTPDRLFFVMEFVNGGDLMFHIQKSRRFDEARARFYAAEIISALMFLHDKGIIYRDLKLDNVLLDHEGHCKLADFGMCKEGICNGVTTATFCGTPDYIAPEILQEMLYGPAVDWWAMGVLLYEMLCGHAPFEAENEDDLFEAILNDEVVYPTWLHEDATGILKSFMTKNPTMRLGSLTQGGEHAILRHPFFKEIDWAQLNHRQIEPPFRPRIKSREDVSNFDPDFIKEEPVLTPIDEGHLPMINQDEFRNFSYVSPELQP

SEQ ID NO: 8900 - RNA, 2052 nt, synthetic construct
  misc_feature 1..2052: note = KPCL__Homo_sapiens__AAH37268
  source 1..2052: mol_type = other RNA
atgtcgtctggcaccatgaagttcaatggctatttgagggtccgcatcggtgaggcagtggggctgcagcccacccgctggtccctgcgccactcgctcttcaagaagggccaccagctgctggacccctatctgacggtgagcgtggaccaggtgcgcgtgggccagaccagcaccaagcagaagaccaacaaacccacgtacaacgaggagttttgcgctaacgtcaccgacggcggccacctcgagttggccgtcttccacgagacgcccctgggctacgaccacttcgtggccaactgcaccctgcagttccaggagctgctgcgcacgaccggcgcctcggacaccttcgagggttgggtggatctcgagccagaggggaaagtattcgtggtaataacccttaccgggagtttcactgaagctactctccagagagaccggatcttcaaacattttaccaggaagcgccaaagggctatgcgaaggcgagtccaccagatcaatggacacaagttcatggccacgtatctgaggcagcccacctactgctctcactgcagggagtttatctggggagtgtttgggaaacagggttatcagtgccaagtgtgcacctgtgtcgtccataaacgctgccatcatctaattgttacagcctgtacttgccaaaacaatattaacaaagtggattcaaagattgcagaacagaggttcgggatcaacatcccacacaagttcagcatccacaactacaaagtgccaacattctgcgatcactgtggctcactgctctggggaataatgcgacaaggacttcagtgtaaaatatgtaaaatgaatgtgcatattcgatgtcaagcgaacgtggcccctaactgtggggtaaatgcggtggaacttgccaagaccctggcagggatgggtctccaacccggaaatatttctccaacctcgaaactcgtttccagatcgaccctaagacgacagggaaaggagagcagcaaagaaggaaatgggattggggttaattcttccaaccgacttggtatcgacaactttgagttcatccgagtgttggggaaggggagttttgggaaggtgatgcttgcaagagtaaaagaaacaggagacctctatgctgtgaaggtgctgaagaaggacgtgattctgcaggatgatgatgtggaatgcaccatgaccgagaaaaggatcctgtctctggcccgcaatcaccccttcctcactcagttgttctgctgctttcagacccccgatcgtctgttttttgtgatggagtttgtgaatgggggtgacttgatgttccacattcagaagtctcgtcgttttgatgaagcacgagctcgcttctatgctgcagaaatcatttcggctctcatgttcctccatgataaaggaatcatctatagagatctgaaactggacaatgtcctgttggaccacgagggtcactgtaaactggcagacttcggaatgtgcaaggaggggatttgcaatggtgtcaccacggccacattctgtggcacgccagactatatcgctccagagatcctccaggaaatgctgtacgggcctgcagtagactggtgggcaatgggcgtgttgctctatgagatgctctgtggtcacgcgccttttgaggcagagaatgaagatgacctctttgaggccatactgaatgatgaggtggtctaccctacctggctccatgaagatgccacagggatcctaaaatctttcatgaccaagaaccccaccatgcgcttgggcagcctgactcagggaggcgagcacgccatcttgagacatcctttttttaaggaaatcgactgggcccagctgaaccatcgccaaatagaaccgcctttcagacccagaatcaaatcccgagaagatgtcagtaattttgaccctgacttcataaaggaagagccagttttaactccaattgatgagggacatcttccaatgattaaccaggatgagtttagaaacttttcctatgtgtctccagaattgcaaccatag

SEQ ID NO: 8901 - RNA, 2052 nt, synthetic construct
  misc_feature 1..2052: note = derived and/or modified sequence opt1 fromKPCL__Homo_sapiens__AAH37268
  source 1..2052: mol_type = other RNA
atgagctccggcaccatgaagttcaacgggtacctgcgcgtgcggatcggcgaggccgtcgggctccagcccacccgctggagcctgcggcactccctgttcaagaagggccaccagctcctggacccgtacctgacggtgagcgtggaccaggtccgcgtggggcagacctccaccaagcagaagaccaacaagcccacgtacaacgaggagttctgcgccaacgtgaccgacggcggccacctcgagctggcggtcttccacgagacgcccctggggtacgaccacttcgtggccaactgcaccctccagttccaggagctgctgcggaccaccggcgccagcgacaccttcgaggggtgggtggacctcgagcccgagggcaaggtcttcgtggtgatcaccctgacggggtccttcaccgaggccaccctgcagcgcgaccggatcttcaagcacttcacccgcaagcggcagcgcgccatgcggcgccgggtccaccagatcaacggccacaagttcatggcgacgtacctccgccagccgacctactgcagccactgccgggagttcatctggggcgtgttcgggaagcagggctaccagtgccaggtgtgcacgtgcgtcgtgcacaagcgctgccaccacctgatcgtgaccgcctgcacgtgccagaacaacatcaacaaggtcgactccaagatcgccgagcagcggttcgggatcaacatcccccacaagttcagcatccacaactacaaggtgcccaccttctgcgaccactgcggctccctgctctggggcatcatgcgccaggggctgcagtgcaagatctgcaagatgaacgtgcacatccggtgccaggccaacgtcgcgcccaactgcggcgtgaacgccgtggagctggccaagaccctcgccgggatgggcctgcagccggggaacatcagccccacctccaagctggtcagccgctccaccctccggcgccagggcaaggagagctccaaggagggcaacgggatcggcgtgaacagctccaaccgcctggggatcgacaacttcgagttcatccgggtcctgggcaaggggagcttcggcaaggtgatgctcgcccgcgtgaaggagaccggcgacctgtacgcggtcaaggtgctgaagaaggacgtgatcctccaggacgacgacgtcgagtgcaccatgaccgagaagcggatcctgagcctggcccgcaaccaccccttcctcacgcagctgttctgctgcttccagacccccgaccggctgttcttcgtgatggagttcgtgaacgggggcgacctcatgttccacatccagaagtcccgccggttcgacgaggcccgcgcccggttctacgccgcggagatcatcagcgccctgatgttcctgcacgacaaggggatcatctaccgcgacctcaagctggacaacgtcctgctcgaccacgagggccactgcaagctggccgacttcgggatgtgcaaggagggcatctgcaacggcgtgaccaccgccacgttctgcgggaccccggactacatcgcccccgagatcctgcaggagatgctctacggccccgcggtggactggtgggccatgggggtcctgctgtacgagatgctctgcggccacgcccccttcgaggccgagaacgaggacgacctgttcgaggccatcctgaacgacgaggtggtgtacccgacctggctgcacgaggacgcgaccggcatcctcaagtccttcatgacgaagaaccccaccatgcggctggggagcctgacccagggcggggagcacgccatcctccgccaccccttcttcaaggagatcgactgggcccagctgaaccaccggcagatcgagcccccgttccgcccccggatcaagtcccgcgaggacgtcagcaacttcgaccccgacttcatcaaggaggagcccgtgctgaccccgatcgacgagggccacctccccatgatcaaccaggacgagttccggaacttctcctacgtgagccccgagctgcagccctga

SEQ ID NO: 8902 - RNA, 2052 nt, synthetic construct
  misc_feature 1..2052: note = derived and/or modified sequence opt2 fromKPCL__Homo_sapiens__AAH37268
  source 1..2052: mol_type = other RNA
atgtcctccggcaccatgaagttcaacggctacctccgcgtccgcatcggcgaggccgtcggcctccagcccacccgctggtccctccgccactccctcttcaagaagggccaccagctcctcgacccctacctcaccgtctccgtcgaccaggtccgcgtcggccagacctccaccaagcagaagaccaacaagcccacctacaacgaggagttctgcgccaacgtcaccgacggcggccacctcgagctcgccgtcttccacgagacccccctcggctacgaccacttcgtcgccaactgcaccctccagttccaggagctcctccgcaccaccggcgcctccgacaccttcgagggctgggtcgacctcgagcccgagggcaaggtcttcgtcgtcatcaccctcaccggctccttcaccgaggccaccctccagcgcgaccgcatcttcaagcacttcacccgcaagcgccagcgcgccatgcgccgccgcgtccaccagatcaacggccacaagttcatggccacctacctccgccagcccacctactgctcccactgccgcgagttcatctggggcgtcttcggcaagcagggctaccagtgccaggtctgcacctgcgtcgtccacaagcgctgccaccacctcatcgtcaccgcctgcacctgccagaacaacatcaacaaggtcgactccaagatcgccgagcagcgcttcggcatcaacatcccccacaagttctccatccacaactacaaggtccccaccttctgcgaccactgcggctccctcctctggggcatcatgcgccagggcctccagtgcaagatctgcaagatgaacgtccacatccgctgccaggccaacgtcgcccccaactgcggcgtcaacgccgtcgagctcgccaagaccctcgccggcatgggcctccagcccggcaacatctcccccacctccaagctcgtctcccgctccaccctccgccgccagggcaaggagtcctccaaggagggcaacggcatcggcgtcaactcctccaaccgcctcggcatcgacaacttcgagttcatccgcgtcctcggcaagggctccttcggcaaggtcatgctcgcccgcgtcaaggagaccggcgacctctacgccgtcaaggtcctcaagaaggacgtcatcctccaggacgacgacgtcgagtgcaccatgaccgagaagcgcatcctctccctcgcccgcaaccaccccttcctcacccagctcttctgctgcttccagacccccgaccgcctcttcttcgtcatggagttcgtcaacggcggcgacctcatgttccacatccagaagtcccgccgcttcgacgaggcccgcgcccgcttctacgccgccgagatcatctccgccctcatgttcctccacgacaagggcatcatctaccgcgacctcaagctcgacaacgtcctcctcgaccacgagggccactgcaagctcgccgacttcggcatgtgcaaggagggcatctgcaacggcgtcaccaccgccaccttctgcggcacccccgactacatcgcccccgagatcctccaggagatgctctacggccccgccgtcgactggtgggccatgggcgtcctcctctacgagatgctctgcggccacgcccccttcgaggccgagaacgaggacgacctcttcgaggccatcctcaacgacgaggtcgtctaccccacctggctccacgaggacgccaccggcatcctcaagtccttcatgaccaagaaccccaccatgcgcctcggctccctcacccagggcggcgagcacgccatcctccgccaccccttcttcaaggagatcgactgggcccagctcaaccaccgccagatcgagccccccttccgcccccgcatcaagtcccgcgaggacgtctccaacttcgaccccgacttcatcaaggaggagcccgtcctcacccccatcgacgagggccacctccccatgatcaaccaggacgagttccgcaacttctcctacgtctcccccgagctccagccctga

SEQ ID NO: 8903 - RNA, 2052 nt, synthetic construct
  misc_feature 1..2052: note = derived and/or modified sequence opt3 fromKPCL__Homo_sapiens__AAH37268
  source 1..2052: mol_type = other RNA
atgagctccggcaccatgaagttcaacgggtacctgagagtgaggatcggagaggccgtcggtctccagcccacacggtggtctcttcgccactcactgtttaaaaagggccatcaattgttagacccttatctgactgttagtgtggatcaggtacgagtggggcagacgagcaccaaacagaagacaaataaaccaacttacaacgaagagttctgcgctaatgtcaccgacggaggccacctagaactcgcagtgtttcatgagacaccgctgggttatgatcacttcgttgccaactgtacccttcaatttcaggaactgttgcgtactacaggggcgtccgacaccttcgagggatgggtggatctcgagcccgaaggcaaggtctttgtggtaattacgctgactggctctttcaccgaggctacactgcagagagacaggatatttaagcatttcactcggaaacgccagagagccatgaggcggcgcgttcaccaaatcaatgggcacaagtttatggcaacctacctccgacagcctacatattgctcgcattgtagagagttcatttggggagtgtttggtaaacagggctaccagtgccaagtctgtacctgcgtggtgcacaagaggtgtcatcacttaatcgtcacggcctgcacttgtcagaacaatattaacaaagttgattcaaagatcgctgaacagcggttcgggataaatatcccacacaagttcagcattcataactataaagtgcccacattttgcgaccactgtggaagtctgctttggggcatcatgcgtcaaggtttgcagtgcaagatttgcaaaatgaatgtacatatccgctgtcaggcaaacgtggcccctaattgcggggtcaacgctgtggagctggccaagaccctagcgggaatgggcctccagccaggcaatatatcccccacttctaaactggttagcagatccacacttaggcggcaagggaaggaatcaagtaaagagggaaacggtattggcgtgaacagctctaatcgactggggatcgataacttcgaatttattcgcgtcttgggaaagggctccttcggtaaggtgatgctcgcaagagtaaaagagaccggggacctgtacgccgttaaggtgctgaaaaaggatgtcatcctgcaggacgatgacgtggaatgtacgatgaccgagaaaaggatcctctcacttgctcggaatcacccttttctgacacagttgttctgctgttttcagactccagaccgcctattctttgtcatggagttcgtgaacggcggagatctgatgtttcatattcaaaagagcagaaggttcgacgaagcccgtgcacggttttacgctgccgagataatcagtgcgctcatgttcctgcacgataagggcattatctatcgagaccttaaactggataatgttttgctcgaccacgaagggcattgcaagctggccgatttcggaatgtgtaaagagggtatatgcaacggcgtgaccacagcaactttttgtgggaccccggactacattgctcccgaaatcttacaggagatgctgtatggacctgccgtagattggtgggctatgggcgtcctactctacgagatgctgtgcggtcacgccccattcgaagcagagaatgaagacgatctttttgaggccatcttgaacgacgaagtggtttatcccacatggctgcatgaggacgctaccgggattctcaagtctttcatgactaaaaatcctacgatgagactgggctcccttacacagggaggcgagcacgcgatcctgaggcacccatttttcaaggaaattgattgggcacagttgaaccatcgccaaatagagcccccgtttcggcctagaatcaagagcagggaagacgtgtcgaatttcgatcccgactttattaaagaggagccagtcctcacccctatcgatgaagggcacttacccatgatcaaccaggacgagttccgcaatttttcttacgtgtccccagaattacagccctga

SEQ ID NO: 8904 - RNA, 2052 nt, synthetic construct
  misc_feature 1..2052: note = derived and/or modified sequence opt4 fromKPCL__Homo_sapiens__AAH37268
  source 1..2052: mol_type = other RNA
atgagcagcggcaccatgaagttcaacggctacctgagagtgagaatcggcgaggccgtgggcctgcagcccaccagatggagcctgagacacagcctgttcaagaagggccaccagctgctggacccctacctgaccgtgagcgtggaccaggtgagagtgggccagaccagcaccaagcagaagaccaacaagcccacctacaacgaggagttctgcgccaacgtgaccgacggcggccacctggagctggccgtgttccacgagacccccctgggctacgaccacttcgtggccaactgcaccctgcagttccaggagctgctgagaaccaccggcgccagcgacaccttcgagggctgggtggacctggagcccgagggcaaggtgttcgtggtgatcaccctgaccggcagcttcaccgaggccaccctgcagagagacagaatcttcaagcacttcaccagaaagagacagagagccatgagaagaagagtgcaccagatcaacggccacaagttcatggccacctacctgagacagcccacctactgcagccactgcagagagttcatctggggcgtgttcggcaagcagggctaccagtgccaggtgtgcacctgcgtggtgcacaagagatgccaccacctgatcgtgaccgcctgcacctgccagaacaacatcaacaaggtggacagcaagatcgccgagcagagattcggcatcaacatcccccacaagttcagcatccacaactacaaggtgcccaccttctgcgaccactgcggcagcctgctgtggggcatcatgagacagggcctgcagtgcaagatctgcaagatgaacgtgcacatcagatgccaggccaacgtggcccccaactgcggcgtgaacgccgtggagctggccaagaccctggccggcatgggcctgcagcccggcaacatcagccccaccagcaagctggtgagcagaagcaccctgagaagacagggcaaggagagcagcaaggagggcaacggcatcggcgtgaacagcagcaacagactgggcatcgacaacttcgagttcatcagagtgctgggcaagggcagcttcggcaaggtgatgctggccagagtgaaggagaccggcgacctgtacgccgtgaaggtgctgaagaaggacgtgatcctgcaggacgacgacgtggagtgcaccatgaccgagaagagaatcctgagcctggccagaaaccaccccttcctgacccagctgttctgctgcttccagacccccgacagactgttcttcgtgatggagttcgtgaacggcggcgacctgatgttccacatccagaagagcagaagattcgacgaggccagagccagattctacgccgccgagatcatcagcgccctgatgttcctgcacgacaagggcatcatctacagagacctgaagctggacaacgtgctgctggaccacgagggccactgcaagctggccgacttcggcatgtgcaaggagggcatctgcaacggcgtgaccaccgccaccttctgcggcacccccgactacatcgcccccgagatcctgcaggagatgctgtacggccccgccgtggactggtgggccatgggcgtgctgctgtacgagatgctgtgcggccacgcccccttcgaggccgagaacgaggacgacctgttcgaggccatcctgaacgacgaggtggtgtaccccacctggctgcacgaggacgccaccggcatcctgaagagcttcatgaccaagaaccccaccatgagactgggcagcctgacccagggcggcgagcacgccatcctgagacaccccttcttcaaggagatcgactgggcccagctgaaccacagacagatcgagccccccttcagacccagaatcaagagcagagaggacgtgagcaacttcgaccccgacttcatcaaggaggagcccgtgctgacccccatcgacgagggccacctgcccatgatcaaccaggacgagttcagaaacttcagctacgtgagccccgagctgcagccctga

SEQ ID NO: 8905 - RNA, 2052 nt, synthetic construct
  misc_feature 1..2052: note = derived and/or modified sequence opt5 fromKPCL__Homo_sapiens__AAH37268
  source 1..2052: mol_type = other RNA
atgagctccggcaccatgaagttcaacgggtacctgagagtgcggatcggagaggccgtcggcctccagcccacacgctggtctctgagacacagcctttttaaaaaggggcaccaactgctcgacccttatctgacggtttccgtggatcaggtgcgggtcggacagacctctacaaaacagaagaccaataaaccgacatacaacgaagagttctgcgctaatgtgaccgacggcgggcaccttgaactggccgtttttcatgagacacccctcggatatgatcacttcgtggcgaactgtaccctgcaatttcaggaactgctccgcacgaccggcgctagcgacacattcgagggctgggtcgatctggagcctgaagggaaggtgtttgttgtgattacccttacaggatccttcaccgaggccacgctgcagagagaccggatctttaagcatttcacacgcaaaagacagcgggccatgcgcagacgggtccaccaaattaatggccacaagtttatggctacctacctccgccagcccacatattgctctcattgtagagagttcatctggggagtgtttgggaaacagggctaccagtgccaagtgtgtacctgcgtcgttcacaagcggtgtcatcacctgattgtgaccgcctgcacatgtcagaacaatatcaacaaagtggatagcaagatcgctgaacagcgcttcgggattaatatccctcacaagttctccattcataactataaagtccccacgttttgcgaccactgtggaagccttctgtggggcatcatgagacaaggcctccagtgcaagatttgcaaaatgaatgtgcatatccggtgtcaggccaacgttgcgcctaattgcggggtgaacgccgtcgagctggctaagaccctggccggaatgggcctccagccggggaatatttctcccacatccaaactggtgagcagatctacccttcgccggcaaggaaaggaatccagcaaagagggcaacgggatcggagttaactcttccaatagactgggcatcgataacttcgaatttattcgcgtgctcggcaaggggagcttcggaaaggtcatgctggctcgggtgaaagagacaggcgacctttacgccgtcaaggtgctgaaaaaggatgttatcctccaggacgatgacgtggaatgtaccatgacggagaaacgcattctgtccctggcgagaaatcacccttttctcacacagctgttctgctgttttcagacccccgaccggcttttctttgtcatggagttcgtgaacgggggagatctgatgtttcatatccaaaagtctagacgcttcgacgaagcccgggctagattttacgccgctgagattatcagcgccctcatgttcctgcacgataagggcatcatttatcgcgaccttaaactggataatgttctcctggaccacgaagggcattgcaagctggccgatttcggcatgtgtaaagagggaatctgcaacggcgtgaccacagctaccttttgtgggacacctgactacattgcgcccgaaatcctccaggagatgctgtatggaccggccgtcgattggtgggctatgggcgtgcttctgtacgagatgctctgcgggcacgcccctttcgaagccgagaatgaagacgatctgtttgaggctattctgaacgacgaagtggtttatcccacgtggcttcatgaggacgccaccggaatcctcaagtccttcatgaccaaaaatcctacaatgcggctgggcagcctgacacaagggggcgagcacgcgatcctcagacacccctttttcaaggaaattgattgggctcagctgaaccatcggcagatcgagcccccttttcgcccgagaattaagtctcgggaagacgtctccaatttcgatcccgactttatcaaagaggagcctgtgcttacccccattgatgaaggacatctgcctatgatcaaccaggacgagttcagaaattttagctacgtgtctcccgaactccagccgtga

SEQ ID NO: 8906 - protein, 706 aa, synthetic construct
  REGION 1..706: note = KPCT__Homo_sapiens__Q04759
MSPFLRIGLSNFDCGSCQSCQGEAVNPYCAVLVKEYVESENGQMYIQKKPTMYPPWDSTFDAHINKGRVMQIIVKGKNVDLISETTVELYSLAERCRKNNGKTEIWLELKPQGRMLMNARYFLEMSDTKDMNEFETEGFFALHQRRGAIKQAKVHHVKCHEFTATFFPQPTFCSVCHEFVWGLNKQGYQCRQCNAAIHKKCIDKVIAKCTGSAINSRETMFHKERFKIDMPHRFKVYNYKSPTFCEHCGTLLWGLARQGLKCDACGMNVHHRCQTKVANLCGINQKLMAEALAMIESTQQARCLRDTEQIFREGPVEIGLPCSIKNEARPPCLPTPGKREPQGISWESPLDEVDKMCHLPEPELNKERPSLQIKLKIEDFILHKMLGKGSFGKVFLAEFKKTNQFFAIKALKKDVVLMDDDVECTMVEKRVLSLAWEHPFLTHMFCTFQTKENLFFVMEYLNGGDLMYHIQSCHKFDLSRATFYAAEIILGLQFLHSKGIVYRDLKLDNILLDKDGHIKIADFGMCKENMLGDAKTNTFCGTPDYIAPEILLGQKYNHSVDWWSFGVLLYEMLIGQSPFHGQDEEELFHSIRMDNPFYPRWLEKEAKDLLVKLFVREPEKRLGVRGDIRQHPLFREINWEELERKEIDPPFRPKVKSPFDCSNFDKEFLNEKPRLSFADRALINSMDQNMFRNFSFMNPGMERLIS

SEQ ID NO: 8907 - RNA, 2121 nt, synthetic construct
  misc_feature 1..2121: note = KPCT__Homo_sapiens__AAA60101
  source 1..2121: mol_type = other RNA
atgtcgccatttcttcggattggcttgtccaactttgactgcgggtcctgccagtcttgtcagggcgaggctgttaacccttactgtgctgtgctcgtcaaagagtatgtcgaatcagagaacgggcagatgtatatccagaaaaagcctaccatgtacccaccctgggacagcacttttgatgcccatatcaacaagggaagagtcatgcagatcattgtgaaaggcaaaaacgtggacctcatctctgaaaccaccgtggagctctactcgctggctgagaggtgcaggaagaacaacgggaagacagaaatatggttagagctgaaacctcaaggccgaatgctaatgaatgcaagatactttctggaaatgagtgacacaaaggacatgaatgaatttgagacggaaggcttctttgctttgcatcagcgccggggtgccatcaagcaggcaaaggtccaccacgtcaagtgccacgagttcactgccaccttcttcccacagcccacattttgctctgtctgccacgagtttgtctggggcctgaacaaacagggctaccagtgccgacaatgcaatgcagcaattcacaagaagtgtattgataaagttatagcaaagtgcacaggatcagctatcaatagccgagaaaccatgttccacaaggagagattcaaaattgacatgccacacagatttaaagtctacaattacaagagcccgaccttctgtgaacactgtgggaccctgctgtggggactggcacggcaaggactcaagtgtgatgcatgtggcatgaatgtgcatcatagatgccagacaaaggtggccaacctttgtggcataaaccagaagctaatggctgaagcgctggccatgattgagagcactcaacaggctcgctgcttaagagatactgaacagatcttcagagaaggtccggttgaaattggtctcccatgctccatcaaaaatgaagcaaggccgccatgtttaccgacaccgggaaaaagagagcctcagggcatttcctgggagtctccgttggatgaggtggataaaatgtgccatcttccagaacctgaactgaacaaagaaagaccatctctgcagattaaactaaaaattgaggattttatcttgcacaaaatgttggggaaaggaagttttggcaaggtcttcctggcagaattcaagaaaaccaatcaatttttcgcaataaaggccttaaagaaagatgtggtcttgatggacgatgatgttgagtgcacgatggtagagaagagagttctttccttggcctgggagcatccgtttctgacgcacatgttttgtacattccagaccaaggaaaacctcttttttgtgatggagtacctcaacggaggggacttaatgtaccacatccaaagctgccacaagttcgacctttccagagcgacgttttatgctgctgaaatcattcttggtctgcagttccttcattccaaaggaatagtctacagggacctgaagctagataacatcctgttagacaaagatggacatatcaagatcgcggattttggaatgtgcaaggagaacatgttaggagatgccaagacgaataccttctgtgggacacctgactacatcgccccagagatcttgctgggtcagaaatacaaccactctgtggactggtggtccttcggggttctcctttatgaaatgctgattggtcagtcgcctttccacgggcaggatgaggaggagctcttccactccatccgcatggacaatcccttttacccacggtggctggagaaggaagcaaaggaccttctggtgaagctcttcgtgcgagaacctgagaagaggctgggcgtgaggggagacatccgccagcaccctttgtttcgggagatcaactgggaggaacttgaacggaaggagattgacccaccgttccggccgaaagtgaaatcaccatttgactgcagcaatttcgacaaagaattcttaaacgagaagccccggctgtcatttgccgacagagcactgatcaacagcatggaccagaatatgttcaggaacttttccttcatgaaccccgggatggagcggctgatatcctga

SEQ ID NO: 8908 - RNA, 2121 nt, synthetic construct
  misc_feature 1..2121: note = derived and/or modified sequence opt1 fromKPCT__Homo_sapiens__AAA60101
  source 1..2121: mol_type = other RNA
atgagccccttcctgcgcatcggcctctccaacttcgactgcgggagctgccagtcctgccagggcgaggccgtgaacccgtactgcgccgtgctggtgaaggagtacgtggagagcgagaacgggcagatgtacatccagaagaagcccaccatgtacccgccctgggactccaccttcgacgcgcacatcaacaagggccgggtcatgcagatcatcgtgaaggggaagaacgtggacctgatcagcgagacgaccgtcgagctctactccctggccgagcgctgccggaagaacaacggcaagaccgagatctggctggagctcaagccccagggccgcatgctgatgaacgcccggtacttcctggagatgagcgacaccaaggacatgaacgagttcgagacggaggggttcttcgccctccaccagcgccggggcgccatcaagcaggcgaaggtgcaccacgtgaagtgccacgagttcaccgccaccttcttcccccagcccaccttctgctccgtctgccacgagttcgtgtgggggctgaacaagcagggctaccagtgccgccagtgcaacgccgccatccacaagaagtgcatcgacaaggtgatcgcgaagtgcacggggagcgccatcaactcccgggagaccatgttccacaaggagcgcttcaagatcgacatgccccaccggttcaaggtctacaactacaagagcccgaccttctgcgagcactgcggcaccctgctctggggcctggcccgccaggggctgaagtgcgacgcctgcggcatgaacgtgcaccaccggtgccagacgaaggtggccaacctctgcgggatcaaccagaagctgatggcggaggccctggccatgatcgagtccacccagcaggcccgctgcctccgggacaccgagcagatcttccgcgagggccccgtcgagatcggcctgccctgcagcatcaagaacgaggcccggcccccgtgcctgcccacccccgggaagcgcgagccccagggcatctcctgggagagcccgctcgacgaggtggacaagatgtgccacctccccgagcccgagctgaacaaggagcggccctccctccagatcaagctgaagatcgaggacttcatcctgcacaagatgctcgggaagggcagcttcgggaaggtgttcctggcggagttcaagaagacgaaccagttcttcgccatcaaggccctgaagaaggacgtcgtgctcatggacgacgacgtggagtgcaccatggtcgagaagcgcgtgctgtccctggcctgggagcacccgttcctcacccacatgttctgcaccttccagacgaaggagaacctgttcttcgtgatggagtacctgaacggcggcgacctcatgtaccacatccagagctgccacaagttcgacctgagccgggccaccttctacgcggccgagatcatcctggggctccagttcctgcactccaagggcatcgtctaccgcgacctgaagctcgacaacatcctgctggacaaggacgggcacatcaagatcgccgacttcggcatgtgcaaggagaacatgctcggggacgccaagaccaacaccttctgcggcacgcccgactacatcgcccccgagatcctgctgggccagaagtacaaccacagcgtggactggtggtccttcggggtcctcctgtacgagatgctgatcggccagagccccttccacgggcaggacgaggaggagctgttccactccatccgcatggacaacccgttctacccccggtggctcgagaaggaggcgaaggacctgctggtgaagctgttcgtgcgcgagcccgagaagcggctgggcgtccgcggggacatccggcagcaccccctgttccgcgagatcaactgggaggagctcgagcggaaggagatcgacccgcccttccgccccaaggtcaagagcccgttcgactgctccaacttcgacaaggagttcctgaacgagaagccccggctgagcttcgccgaccgcgccctcatcaactccatggaccagaacatgttccggaacttcagcttcatgaaccccggcatggagcgcctgatctcctga

SEQ ID NO: 8909 - RNA, 2121 nt, synthetic construct
  misc_feature 1..2121: note = derived and/or modified sequence opt2 fromKPCT__Homo_sapiens__AAA60101
  source 1..2121: mol_type = other RNA
atgtcccccttcctccgcatcggcctctccaacttcgactgcggctcctgccagtcctgccagggcgaggccgtcaacccctactgcgccgtcctcgtcaaggagtacgtcgagtccgagaacggccagatgtacatccagaagaagcccaccatgtaccccccctgggactccaccttcgacgcccacatcaacaagggccgcgtcatgcagatcatcgtcaagggcaagaacgtcgacctcatctccgagaccaccgtcgagctctactccctcgccgagcgctgccgcaagaacaacggcaagaccgagatctggctcgagctcaagccccagggccgcatgctcatgaacgcccgctacttcctcgagatgtccgacaccaaggacatgaacgagttcgagaccgagggcttcttcgccctccaccagcgccgcggcgccatcaagcaggccaaggtccaccacgtcaagtgccacgagttcaccgccaccttcttcccccagcccaccttctgctccgtctgccacgagttcgtctggggcctcaacaagcagggctaccagtgccgccagtgcaacgccgccatccacaagaagtgcatcgacaaggtcatcgccaagtgcaccggctccgccatcaactcccgcgagaccatgttccacaaggagcgcttcaagatcgacatgccccaccgcttcaaggtctacaactacaagtcccccaccttctgcgagcactgcggcaccctcctctggggcctcgcccgccagggcctcaagtgcgacgcctgcggcatgaacgtccaccaccgctgccagaccaaggtcgccaacctctgcggcatcaaccagaagctcatggccgaggccctcgccatgatcgagtccacccagcaggcccgctgcctccgcgacaccgagcagatcttccgcgagggccccgtcgagatcggcctcccctgctccatcaagaacgaggcccgccccccctgcctccccacccccggcaagcgcgagccccagggcatctcctgggagtcccccctcgacgaggtcgacaagatgtgccacctccccgagcccgagctcaacaaggagcgcccctccctccagatcaagctcaagatcgaggacttcatcctccacaagatgctcggcaagggctccttcggcaaggtcttcctcgccgagttcaagaagaccaaccagttcttcgccatcaaggccctcaagaaggacgtcgtcctcatggacgacgacgtcgagtgcaccatggtcgagaagcgcgtcctctccctcgcctgggagcaccccttcctcacccacatgttctgcaccttccagaccaaggagaacctcttcttcgtcatggagtacctcaacggcggcgacctcatgtaccacatccagtcctgccacaagttcgacctctcccgcgccaccttctacgccgccgagatcatcctcggcctccagttcctccactccaagggcatcgtctaccgcgacctcaagctcgacaacatcctcctcgacaaggacggccacatcaagatcgccgacttcggcatgtgcaaggagaacatgctcggcgacgccaagaccaacaccttctgcggcacccccgactacatcgcccccgagatcctcctcggccagaagtacaaccactccgtcgactggtggtccttcggcgtcctcctctacgagatgctcatcggccagtcccccttccacggccaggacgaggaggagctcttccactccatccgcatggacaaccccttctacccccgctggctcgagaaggaggccaaggacctcctcgtcaagctcttcgtccgcgagcccgagaagcgcctcggcgtccgcggcgacatccgccagcaccccctcttccgcgagatcaactgggaggagctcgagcgcaaggagatcgacccccccttccgccccaaggtcaagtcccccttcgactgctccaacttcgacaaggagttcctcaacgagaagccccgcctctccttcgccgaccgcgccctcatcaactccatggaccagaacatgttccgcaacttctccttcatgaaccccggcatggagcgcctcatctcctga

SEQ ID NO: 8910 - RNA, 2121 nt, synthetic construct
  misc_feature 1..2121: note = derived and/or modified sequence opt3 fromKPCT__Homo_sapiens__AAA60101
  source 1..2121: mol_type = other RNA
atgagccccttcctgagaatcggcctctccaactttgactgcgggtcttgtcagtcatgccaaggagaggccgtgaatccttactgtgctgtccttgttaaggaatatgtggagagtgaaaacggtcagatgtacattcagaaaaagccaaccatgtatccgccctgggatagcacattcgacgcacacataaataaaggcagggtaatgcagatcattgtgaaggggaaaaacgtcgatctgatctccgagactacggtggaattgtactctttagccgagcggtgccgcaagaataacggaaagaccgagatttggctggaactaaaacctcaaggccgaatgctcatgaatgcgcgttattttctggagatgtcggacacaaaggatatgaacgagttcgaaactgaggggtttttcgcccttcatcagagaaggggtgctatcaaacaggcaaaggttcaccatgtgaaatgtcacgaatttaccgccacattctttccacagcccaccttctgctcagtctgtcatgagtttgtgtggggactgaataagcaaggctaccagtgccggcagtgtaacgctgcaatacacaagaaatgcatcgacaaggtaattgccaaatgtactggcagcgctatcaatagtcgcgaaacaatgttccacaaggagagatttaaaattgatatgcctcataggttcaaggtttataactacaaatccccaaccttctgcgaacactgcgggacgttgctctggggactggcccggcagggtctgaagtgtgacgcgtgcggcatgaatgtgcatcaccgctgtcaaactaaggtcgcaaacctctgcgggatcaatcagaaattaatggccgaggctctggccatgatagagtctacccagcaagcacgatgtcttagagatacagaacagatttttagggagggacccgtggaaatcggcttgccttgcagcattaagaacgaggctcggccaccgtgtctgcccactcctggtaaacgtgaaccacaggggatctcctgggagtcacccctagacgaggtggataagatgtgccacctccctgaaccagagctgaacaaagaacgccccagtcttcagatcaagctgaagattgaggacttcatattgcataaaatgctcggaaagggcagctttggcaaagtcttcctggccgaatttaagaaaaccaatcaattctttgcgatcaaggccttaaagaaagatgttgtgctgatggacgacgatgtagagtgtacaatggtggagaagagagtcctctctcttgcatgggaacacccgttcctgacccatatgttttgcacgttccagactaaagagaacttgtttttcgtgatggaatacctaaatgggggagacctgatgtatcacattcagtcctgtcataagtttgatctctcaagggctacattctacgccgctgagatcatactgggtcttcagttcctgcacagcaaaggcattgtttatcgggacttgaagctcgataacatcctgttagacaaggatgggcacatcaaaattgccgactttggaatgtgcaaggagaatatgctgggcgatgcaaaaaccaacactttctgcggtacacctgactacatcgcccccgaaattctactcgggcaaaagtataatcatagtgtggattggtggtcttttggcgtcctgctttacgagatgttgataggacagtccccattccacggccaggacgaagaggaactgtttcatagcatccgaatggacaaccctttctatccccgctggctcgagaaagaggctaaggatctgcttgtgaaactgtttgtaagagaaccagagaagaggttgggggttcggggagacattcgccagcaccccctcttcagagaaatcaattgggaggaactggagaggaaggagatcgatcctccatttcgtccgaaagtgaagtcgcccttcgactgttctaactttgataaagagttcttaaatgaaaagcctcggctgtcctttgcggaccgagcactaattaactcaatggatcaaaatatgttcagaaacttcagttttatgaatccaggtatggaaaggctcataagctga

SEQ ID NO: 8911 - RNA, 2121 nt, synthetic construct
  misc_feature 1..2121: note = derived and/or modified sequence opt4 fromKPCT__Homo_sapiens__AAA60101
  source 1..2121: mol_type = other RNA
atgagccccttcctgagaatcggcctgagcaacttcgactgcggcagctgccagagctgccagggcgaggccgtgaacccctactgcgccgtgctggtgaaggagtacgtggagagcgagaacggccagatgtacatccagaagaagcccaccatgtaccccccctgggacagcaccttcgacgcccacatcaacaagggcagagtgatgcagatcatcgtgaagggcaagaacgtggacctgatcagcgagaccaccgtggagctgtacagcctggccgagagatgcagaaagaacaacggcaagaccgagatctggctggagctgaagccccagggcagaatgctgatgaacgccagatacttcctggagatgagcgacaccaaggacatgaacgagttcgagaccgagggcttcttcgccctgcaccagagaagaggcgccatcaagcaggccaaggtgcaccacgtgaagtgccacgagttcaccgccaccttcttcccccagcccaccttctgcagcgtgtgccacgagttcgtgtggggcctgaacaagcagggctaccagtgcagacagtgcaacgccgccatccacaagaagtgcatcgacaaggtgatcgccaagtgcaccggcagcgccatcaacagcagagagaccatgttccacaaggagagattcaagatcgacatgccccacagattcaaggtgtacaactacaagagccccaccttctgcgagcactgcggcaccctgctgtggggcctggccagacagggcctgaagtgcgacgcctgcggcatgaacgtgcaccacagatgccagaccaaggtggccaacctgtgcggcatcaaccagaagctgatggccgaggccctggccatgatcgagagcacccagcaggccagatgcctgagagacaccgagcagatcttcagagagggccccgtggagatcggcctgccctgcagcatcaagaacgaggccagacccccctgcctgcccacccccggcaagagagagccccagggcatcagctgggagagccccctggacgaggtggacaagatgtgccacctgcccgagcccgagctgaacaaggagagacccagcctgcagatcaagctgaagatcgaggacttcatcctgcacaagatgctgggcaagggcagcttcggcaaggtgttcctggccgagttcaagaagaccaaccagttcttcgccatcaaggccctgaagaaggacgtggtgctgatggacgacgacgtggagtgcaccatggtggagaagagagtgctgagcctggcctgggagcaccccttcctgacccacatgttctgcaccttccagaccaaggagaacctgttcttcgtgatggagtacctgaacggcggcgacctgatgtaccacatccagagctgccacaagttcgacctgagcagagccaccttctacgccgccgagatcatcctgggcctgcagttcctgcacagcaagggcatcgtgtacagagacctgaagctggacaacatcctgctggacaaggacggccacatcaagatcgccgacttcggcatgtgcaaggagaacatgctgggcgacgccaagaccaacaccttctgcggcacccccgactacatcgcccccgagatcctgctgggccagaagtacaaccacagcgtggactggtggagcttcggcgtgctgctgtacgagatgctgatcggccagagccccttccacggccaggacgaggaggagctgttccacagcatcagaatggacaaccccttctaccccagatggctggagaaggaggccaaggacctgctggtgaagctgttcgtgagagagcccgagaagagactgggcgtgagaggcgacatcagacagcaccccctgttcagagagatcaactgggaggagctggagagaaaggagatcgacccccccttcagacccaaggtgaagagccccttcgactgcagcaacttcgacaaggagttcctgaacgagaagcccagactgagcttcgccgacagagccctgatcaacagcatggaccagaacatgttcagaaacttcagcttcatgaaccccggcatggagagactgatcagctga

SEQ ID NO: 8912 - RNA, 2121 nt, synthetic construct
  misc_feature 1..2121: note = derived and/or modified sequence opt5 fromKPCT__Homo_sapiens__AAA60101
  source 1..2121: mol_type = other RNA
atgagccccttcctgagaatcggcctctccaactttgactgcgggtcttgtcagagctgccaaggagaggccgtgaatccttactgtgctgtcctggttaaggaatatgtggagtccgaaaacggccagatgtacattcagaaaaagccgaccatgtatcccccttgggattctacattcgacgcccacatcaataaagggcgggtgatgcagattatcgtcaagggcaaaaacgtggatcttattagcgagacgaccgttgaactgtactccctcgcggagcgctgcagaaagaataacggaaagacagagatctggctggaacttaaaccccaagggcggatgctgatgaatgctcgctattttctcgagatgtctgacaccaaggatatgaacgagttcgaaacagagggatttttcgccctgcatcagagacggggcgccatcaaacaggctaaggtgcaccatgtcaaatgtcacgaatttaccgccacattctttcctcagcccaccttctgcagcgtgtgtcatgagtttgtttggggcctgaataagcaagggtaccagtgccgccagtgtaacgctgccattcacaagaaatgcatcgacaaggtgattgcgaaatgtacgggatccgccatcaatagcagagaaaccatgttccacaaggagcggtttaaaattgatatgcctcatcgcttcaaggtctataactacaaatctccgacattctgcgaacactgcggcaccctcctgtgggggcttgctagacagggactgaagtgtgacgcctgcggcatgaatgtgcatcaccggtgtcaaacaaaggtggctaacctctgcgggatcaatcagaaactgatggccgaggcgcttgccatgattgagtccacccagcaagctcgctgtctgagagatacggaacagatctttcgggagggacccgtcgaaatcggcctcccttgcagcattaagaacgaggccagacccccttgtctgcccacaccgggcaaacgcgaacctcaggggatctcttgggagagccccctggacgaggttgataagatgtgccacctccctgaacccgagctgaacaaagaacggccctcccttcagattaagctgaagatcgaggacttcattctccataaaatgctgggaaagggctcttttgggaaagtgttccttgctgaatttaagaaaaccaatcaattctttgccatcaaggccctgaagaaagatgtggtcctcatggacgacgatgtggagtgtacaatggttgagaagagagtgctgtccctggcttgggaacaccctttcctcacccatatgttttgcaccttccagacaaaagagaacctgtttttcgtcatggaataccttaatggaggcgacctgatgtatcacatccagagctgtcataagtttgatctctcccgcgcgacgttctacgccgctgagattatcctggggcttcagttcctgcactctaaaggaattgtgtatcgggacctcaagctggataacatcctgctcgacaaggatggccacattaaaatcgccgactttggcatgtgcaaggagaatatgctgggggatgccaaaaccaacacattctgcggaaccccggactacatcgctcccgaaattcttctgggccaaaagtataatcatagcgttgattggtggtcctttggggtgctcctgtacgagatgctgatcggacagagccctttccacggccaggacgaagaggaactttttcattctattagaatggacaaccccttctatcctcgctggctcgagaaagaggccaaggatctgctggtcaaactctttgtgcgggaacccgagaagagactgggggtccgcggcgacatccggcagcacccgcttttcagagaaattaattgggaggaactggagcgcaaggagatcgatcctccctttcggcctaaagtgaagtcccccttcgactgtagcaactttgataaagagttcctcaatgaaaagcctagactgtcttttgcggaccgcgctctgattaacagcatggatcaaaatatgttccggaacttctcctttatgaatcccggaatggaaagacttatctcttga

SEQ ID NO: 8913 - protein, 592 aa, synthetic construct
  REGION 1..592: note = KPCZ__Homo_sapiens__Q05513
MPSRTGPKMEGSGGRVRLKAHYGGDIFITSVDAATTFEELCEEVRDMCRLHQQHPLTLKWVDSEGDPCTVSSQMELEEAFRLARQCRDEGLIIHVFPSTPEQPGLPCPGEDKSIYRRGARRWRKLYRANGHLFQAKRFNRRAYCGQCSERIWGLARQGYRCINCKLLVHKRCHGLVPLTCRKHMDSVMPSQEPPVDDKNEDADLPSEETDGIAYISSSRKHDSIKDDSEDLKPVIDGMDGIKISQGLGLQDFDLIRVIGRGSYAKVLLVRLKKNDQIYAMKVVKKELVHDDEDIDWVQTEKHVFEQASSNPFLVGLHSCFQTTSRLFLVIEYVNGGDLMFHMQRQRKLPEEHARFYAAEICIALNFLHERGIIYRDLKLDNVLLDADGHIKLTDYGMCKEGLGPGDTTSTFCGTPNYIAPEILRGEEYGFSVDWWALGVLMFEMMAGRSPFDIITDNPDMNTEDYLFQVILEKPIRIPRFLSVKASHVLKGFLNKDPKERLGCRPQTGFSDIKSHAFFRSIDWDLLEKKQALPPFQPQITDDYGLDNFDTQFTSEPVQLTPDDEDAIKRIDQSEFEGFEYINPLLLSTEESV

SEQ ID NO: 8914 - RNA, 1779 nt, synthetic construct
  misc_feature 1..1779: note = KPCZ__Homo_sapiens__AAH08058
  source 1..1779: mol_type = other RNA
atgcccagcaggaccggccccaagatggaagggagcggcggccgcgtccgcctcaaggcgcattacgggggggacatcttcatcaccagcgtggacgccgccacgaccttcgaggagctctgtgaggaagtgagagacatgtgtcgtctgcaccagcagcacccgctcaccctcaagtgggtggacagcgaaggtgacccttgcacggtgtcctcccagatggagctggaagaggctttccgcctggcccgtcagtgcagggatgaaggcctcatcattcatgttttcccgagcacccctgagcagcctggcctgccatgtccgggagaagacaaatctatctaccgccggggagccagaagatggaggaagctgtaccgtgccaacggccacctcttccaagccaagcgctttaacaggagagcgtactgcggtcagtgcagcgagaggatatggggcctcgcgaggcaaggctacaggtgcatcaactgcaaactgctggtccataagcgctgccacggcctcgtcccgctgacctgcaggaagcatatggattctgtcatgccttcccaagagcctccagtagacgacaagaacgaggacgccgaccttccttccgaggagacagatggaattgcttacatttcctcatcccggaagcatgacagcattaaagacgactcggaggaccttaagccagttatcgatgggatggatggaatcaaaatctctcaggggcttgggctgcaggactttgacctaatcagagtcatcgggcgcgggagctacgccaaggttctcctggtgcggttgaagaagaatgaccaaatttacgccatgaaagtggtgaagaaagagctggtgcatgatgacgaggatattgactgggtacagacagagaagcacgtgtttgagcaggcatccagcaaccccttcctggtcggattacactcctgcttccagacgacaagtcggttgttcctggtcattgagtacgtcaacggcggggacctgatgttccacatgcagaggcagaggaagctccctgaggagcacgccaggttctacgcggccgagatctgcatcgccctcaacttcctgcacgagagggggatcatctacagggacctgaagctggacaacgtcctcctggatgcggacgggcacatcaagctcacagactacggcatgtgcaaggaaggcctgggccctggtgacacaacgagcactttctgcggaaccccgaattacatcgcccccgaaatcctgcggggagaggagtacgggttcagcgtggactggtgggcgctgggagtcctcatgtttgagatgatggccgggcgctccccgttcgacatcatcaccgacaacccggacatgaacacagaggactaccttttccaagtgatcctggagaagcccatccggatcccccggttcctgtccgtcaaagcctcccatgttttaaaaggatttttaaataaggaccccaaagagaggctcggctgccggccacagactggattttctgacatcaagtcccacgcgttcttccgcagcatagactgggacttgctggagaagaagcaggcgctccctccattccagccacagatcacagacgactacggtctggacaactttgacacacagttcaccagcgagcccgtgcagctgaccccagacgatgaggatgccataaagaggatcgaccagtcagagttcgaaggctttgagtatatcaacccattattgctgtccaccgaggagtcggtgtga

SEQ ID NO: 8915 - RNA, 1779 nt, synthetic construct
  misc_feature 1..1779: note = derived and/or modified sequence opt1 fromKPCZ__Homo_sapiens__AAH08058
  source 1..1779: mol_type = other RNA
atgcccagccgcaccggcccgaagatggaggggtccggcgggcgggtgcgcctgaaggcccactacggcggggacatcttcatcaccagcgtcgacgccgcgacgaccttcgaggagctctgcgaggaggtgcgggacatgtgccgcctgcaccagcagcaccccctgaccctcaagtgggtggactccgagggcgacccctgcaccgtcagctcccagatggagctggaggaggccttccggctggcccgccagtgccgggacgagggcctcatcatccacgtgttccccagcacgccggagcagcccgggctgccctgccccggcgaggacaagtccatctaccgccgcggggcccggcggtggcgcaagctgtaccgggccaacggccacctcttccaggcgaagcgcttcaaccggcgcgcctactgcgggcagtgcagcgagcggatctggggcctggcccgccagggctaccggtgcatcaactgcaagctgctcgtgcacaagcgctgccacgggctggtcccgctgacctgccggaagcacatggactccgtgatgcccagccaggagccgcccgtggacgacaagaacgaggacgccgacctcccctccgaggagaccgacggcatcgcgtacatcagctccagccgcaagcacgactccatcaaggacgacagcgaggacctgaagcccgtcatcgacgggatggacggcatcaagatctcccagggcctggggctccaggacttcgacctgatccgcgtgatcggccgggggagctacgccaaggtgctgctcgtccgcctgaagaagaacgaccagatctacgccatgaaggtggtgaagaaggagctggtccacgacgacgaggacatcgactgggtgcagaccgagaagcacgtgttcgagcaggcctccagcaaccccttcctcgtcggcctgcacagctgcttccagacgacctcccggctgttcctcgtgatcgagtacgtgaacgggggcgacctgatgttccacatgcagcgccagcggaagctgcccgaggagcacgcccgcttctacgcggccgagatctgcatcgccctcaacttcctgcacgagcggggcatcatctaccgcgacctgaagctcgacaacgtcctgctggacgccgacgggcacatcaagctcaccgactacggcatgtgcaaggaggggctgggcccgggggacaccacgagcaccttctgcggcacccccaactacatcgcccccgagatcctgcggggcgaggagtacgggttctccgtggactggtgggcgctcggcgtgctgatgttcgagatgatggccgggcgcagccccttcgacatcatcaccgacaacccggacatgaacacggaggactacctgttccaggtcatcctcgagaagcccatccggatcccccgcttcctgtccgtgaaggccagccacgtcctgaagggcttcctcaacaaggaccccaaggagcggctggggtgccgcccgcagaccggcttctccgacatcaagagccacgccttcttccggtccatcgactgggacctgctcgagaagaagcaggccctgccgcccttccagccccagatcaccgacgactacggcctggacaacttcgacacccagttcacgagcgagcccgtgcagctgacccccgacgacgaggacgcgatcaagcgcatcgaccagtccgagttcgaggggttcgagtacatcaaccccctcctgctgagcaccgaggagtccgtgtga

SEQ ID NO: 8916 - RNA, 1779 nt, synthetic construct
  misc_feature 1..1779: note = derived and/or modified sequence opt2 fromKPCZ__Homo_sapiens__AAH08058
  source 1..1779: mol_type = other RNA
atgccctcccgcaccggccccaagatggagggctccggcggccgcgtccgcctcaaggcccactacggcggcgacatcttcatcacctccgtcgacgccgccaccaccttcgaggagctctgcgaggaggtccgcgacatgtgccgcctccaccagcagcaccccctcaccctcaagtgggtcgactccgagggcgacccctgcaccgtctcctcccagatggagctcgaggaggccttccgcctcgcccgccagtgccgcgacgagggcctcatcatccacgtcttcccctccacccccgagcagcccggcctcccctgccccggcgaggacaagtccatctaccgccgcggcgcccgccgctggcgcaagctctaccgcgccaacggccacctcttccaggccaagcgcttcaaccgccgcgcctactgcggccagtgctccgagcgcatctggggcctcgcccgccagggctaccgctgcatcaactgcaagctcctcgtccacaagcgctgccacggcctcgtccccctcacctgccgcaagcacatggactccgtcatgccctcccaggagccccccgtcgacgacaagaacgaggacgccgacctcccctccgaggagaccgacggcatcgcctacatctcctcctcccgcaagcacgactccatcaaggacgactccgaggacctcaagcccgtcatcgacggcatggacggcatcaagatctcccagggcctcggcctccaggacttcgacctcatccgcgtcatcggccgcggctcctacgccaaggtcctcctcgtccgcctcaagaagaacgaccagatctacgccatgaaggtcgtcaagaaggagctcgtccacgacgacgaggacatcgactgggtccagaccgagaagcacgtcttcgagcaggcctcctccaaccccttcctcgtcggcctccactcctgcttccagaccacctcccgcctcttcctcgtcatcgagtacgtcaacggcggcgacctcatgttccacatgcagcgccagcgcaagctccccgaggagcacgcccgcttctacgccgccgagatctgcatcgccctcaacttcctccacgagcgcggcatcatctaccgcgacctcaagctcgacaacgtcctcctcgacgccgacggccacatcaagctcaccgactacggcatgtgcaaggagggcctcggccccggcgacaccacctccaccttctgcggcacccccaactacatcgcccccgagatcctccgcggcgaggagtacggcttctccgtcgactggtgggccctcggcgtcctcatgttcgagatgatggccggccgctcccccttcgacatcatcaccgacaaccccgacatgaacaccgaggactacctcttccaggtcatcctcgagaagcccatccgcatcccccgcttcctctccgtcaaggcctcccacgtcctcaagggcttcctcaacaaggaccccaaggagcgcctcggctgccgcccccagaccggcttctccgacatcaagtcccacgccttcttccgctccatcgactgggacctcctcgagaagaagcaggccctcccccccttccagccccagatcaccgacgactacggcctcgacaacttcgacacccagttcacctccgagcccgtccagctcacccccgacgacgaggacgccatcaagcgcatcgaccagtccgagttcgagggcttcgagtacatcaaccccctcctcctctccaccgaggagtccgtctga

SEQ ID NO: 8917 - RNA, 1779 nt, synthetic construct
  misc_feature 1..1779: note = derived and/or modified sequence opt3 fromKPCZ__Homo_sapiens__AAH08058
  source 1..1779: mol_type = other RNA
atgcccagcagaaccggccctaagatggaggggtccggaggtagggtgcggctgaaagcccactacggcggggacatcttcattacatctgtcgatgctgcaactacgtttgaggaactctgcgaagaggttcgcgacatgtgtcgacttcatcagcaacacccactgaccttgaagtgggtggattcagaaggagacccgtgcacagtaagtagccagatggagttagaggaagccttccgtctggcgagacagtgtagggatgagggcctaataatccatgtgtttccctccactcctgaacagccaggtctcccctgccctggggaggacaaatctatttatcggcgcggagctagaaggtggcggaagctgtaccgcgccaacggccaccttttccaagcaaaacgatttaatagaagggcctattgtggccagtgctcggagcggatctgggggctggctcgtcagggataccgctgtattaactgcaagttgctcgtccataagagatgtcacggtctggtgccactgacctgcaggaaacacatggattcagttatgcccagccaggaacctccagtggacgataagaatgaggacgcagatctcccgagtgaagagacagacggcatcgcctatatatcctctagccggaaacatgattccatcaaggacgactcagaagatttaaaacccgtcattgacgggatggatggaatcaagattagtcaaggcctgggtcttcaggacttcgatttgatccgagtgatagggcgcggaagctacgctaaggtactgctagttagactcaaaaagaacgaccagatttatgccatgaaagtggtcaagaaagagctggtgcacgatgacgaggatatcgactgggtgcagaccgaaaagcatgtctttgagcaagcgtcttccaatcctttccttgttggcctgcactcatgttttcagactacaagcaggttgttcctcgtgattgaatacgtaaacggcggggatctgatgtttcacatgcagcggcaacgcaaattaccagaggaacatgcaagattctacgccgctgagatctgcatcgccctgaattttctccacgagaggggaattatatatcgtgaccttaagctggacaacgtgttgctagatgcagacggtcatatcaagctgaccgattacggcatgtgcaaagaagggctcggacccggcgacacgaccagtactttctgtggtacacctaattatattgctccagagatcctgagaggggaagagtacggcttctctgtcgattggtgggcccttggagtgctgatgtttgaaatgatggcgggccgatcccccttcgacataattactgataacccggacatgaataccgaggattatttgtttcaggttatcctcgagaagcctatccggattcccaggttcctgagcgtgaaagcctcgcacgtcttaaaggggtttctgaacaaagacccaaaggaacgcctaggatgccggcctcagacaggtttctctgatatcaagtcccatgcatttttcagatcaattgactgggatctcctggagaaaaagcaggcccttcccccatttcaaccccagataaccgacgactacggcttggataatttcgacacgcagtttacaagtgaacctgtgcagctgactccagatgacgaggatgctatcaaaaggattgaccaaagcgagttcgaagggtttgagtatatcaacccgctcctgctttccaccgaagagtctgtatga

SEQ ID NO: 8918 - RNA, 1779 nt, synthetic construct
  misc_feature 1..1779: note = derived and/or modified sequence opt4 fromKPCZ__Homo_sapiens__AAH08058
  source 1..1779: mol_type = other RNA
atgcccagcagaaccggccccaagatggagggcagcggcggcagagtgagactgaaggcccactacggcggcgacatcttcatcaccagcgtggacgccgccaccaccttcgaggagctgtgcgaggaggtgagagacatgtgcagactgcaccagcagcaccccctgaccctgaagtgggtggacagcgagggcgacccctgcaccgtgagcagccagatggagctggaggaggccttcagactggccagacagtgcagagacgagggcctgatcatccacgtgttccccagcacccccgagcagcccggcctgccctgccccggcgaggacaagagcatctacagaagaggcgccagaagatggagaaagctgtacagagccaacggccacctgttccaggccaagagattcaacagaagagcctactgcggccagtgcagcgagagaatctggggcctggccagacagggctacagatgcatcaactgcaagctgctggtgcacaagagatgccacggcctggtgcccctgacctgcagaaagcacatggacagcgtgatgcccagccaggagccccccgtggacgacaagaacgaggacgccgacctgcccagcgaggagaccgacggcatcgcctacatcagcagcagcagaaagcacgacagcatcaaggacgacagcgaggacctgaagcccgtgatcgacggcatggacggcatcaagatcagccagggcctgggcctgcaggacttcgacctgatcagagtgatcggcagaggcagctacgccaaggtgctgctggtgagactgaagaagaacgaccagatctacgccatgaaggtggtgaagaaggagctggtgcacgacgacgaggacatcgactgggtgcagaccgagaagcacgtgttcgagcaggccagcagcaaccccttcctggtgggcctgcacagctgcttccagaccaccagcagactgttcctggtgatcgagtacgtgaacggcggcgacctgatgttccacatgcagagacagagaaagctgcccgaggagcacgccagattctacgccgccgagatctgcatcgccctgaacttcctgcacgagagaggcatcatctacagagacctgaagctggacaacgtgctgctggacgccgacggccacatcaagctgaccgactacggcatgtgcaaggagggcctgggccccggcgacaccaccagcaccttctgcggcacccccaactacatcgcccccgagatcctgagaggcgaggagtacggcttcagcgtggactggtgggccctgggcgtgctgatgttcgagatgatggccggcagaagccccttcgacatcatcaccgacaaccccgacatgaacaccgaggactacctgttccaggtgatcctggagaagcccatcagaatccccagattcctgagcgtgaaggccagccacgtgctgaagggcttcctgaacaaggaccccaaggagagactgggctgcagaccccagaccggcttcagcgacatcaagagccacgccttcttcagaagcatcgactgggacctgctggagaagaagcaggccctgccccccttccagccccagatcaccgacgactacggcctggacaacttcgacacccagttcaccagcgagcccgtgcagctgacccccgacgacgaggacgccatcaagagaatcgaccagagcgagttcgagggcttcgagtacatcaaccccctgctgctgagcaccgaggagagcgtgtga

SEQ ID NO: 8919 - RNA, 1779 nt, synthetic construct
  misc_feature 1..1779: note = derived and/or modified sequence opt5 fromKPCZ__Homo_sapiens__AAH08058
  source 1..1779: mol_type = other RNA
atgcccagcagaaccggccctaagatggaggggtccggaggccgggtgcgcctgaaagcccactacgggggagacatcttcattacatctgtcgatgctgccacgacctttgaggaactctgcgaagaggttagagacatgtgtcggctgcatcagcaacacccgcttacactgaagtgggtggatagcgaaggcgacccctgcaccgtgtcctctcagatggagctcgaggaagcgttccgcctggctagacagtgtcgggatgaggggcttatcattcatgtctttcctagcacacccgaacagcctggactgccctgccctggcgaggacaaatccatctatcgcagaggcgcccggcgctggagaaagctctaccgggccaacgggcacctgttccaagctaaacgctttaatagacgggcctattgtggacagtgctctgagcgcatttggggcctggctagacaggggtaccggtgtatcaactgcaagctcctggtgcataagagatgtcacggacttgttccgctgacctgccgcaaacacatggatagcgtgatgccctcccaggaacctcccgtcgacgataagaatgaggacgccgatctccctagcgaagagacagacggcatcgcgtatatttcttccagccggaaacatgattctatcaaggacgactccgaagatctgaaacccgtgattgacgggatggatggaatcaagattagccaaggccttggcctgcaggacttcgatctcatcagagttattgggcgcggatcttacgccaaggtgctgctggtccggctcaaaaagaacgaccagatctatgctatgaaagtggtgaagaaagagctggtccacgatgacgaggatatcgactgggttcagaccgaaaagcatgtgtttgagcaagcctccagcaatccgttccttgtgggcctgcactcctgttttcagacgacctctagactcttcctggtcattgaatacgtgaacgggggagatcttatgtttcacatgcagcgccaacggaaactgcctgaggaacatgctagattctacgccgcggagatctgcattgccctcaattttctgcacgagcgcggcatcatttatcgggacctgaagctcgacaacgttctgcttgatgctgacgggcatatcaagctgacagattacggaatgtgcaaagaaggcctcggccccggggacaccacaagcaccttctgtggaacgcctaattatatcgcccccgagattctgagaggcgaagagtacgggttctccgtggattggtgggctcttggagtcctgatgtttgaaatgatggccggccgcagccccttcgacatcattacagataaccctgacatgaataccgaggattatctctttcaggtgatcctggagaagccgattcggatccccagattcctgtctgttaaagcctcccacgtgctcaaggggtttctgaacaaagaccctaaggaacggcttggctgccgcccccagacaggattcagcgatatcaagtctcatgcgtttttcagaagcattgactgggatctgctcgagaaaaagcaggctctgcctccctttcaaccgcagatcaccgacgactacggcctggataatttcgacacccagtttacatccgaacctgtccagcttacgcccgatgacgaggatgccattaaacggatcgaccaatctgagttcgaagggtttgagtatattaaccctctcctgctgagcaccgaagagtccgtgtga

SEQ ID NO: 8920 - protein, 678 aa, synthetic construct
  REGION 1..678: note = LGP2__Homo_sapiens__A0A024R1Y5
MELRSYQWEVIMPALEGKNIIIWLPTGAGKTRAAAYVAKRHLETVDGAKVVVLVNRVHLVTQHGEEFRRMLDGRWTVTTLSGDMGPRAGFGHLARCHDLLICTAELLQMALTSPEEEEHVELTVFSLIVVDECHHTHKDTVYNVIMSQYLELKLQRAQPLPQVLGLTASPGTGGASKLDGAINHVLQLCANLDTWCIMSPQNCCPQLQEHSQQPCKQYNLCHRRSQDPFGDLLKKLMDQIHDHLEMPELSRKFGTQMYEQQVVKLSEAAALAGLQEQRVYALHLRRYNDALLIHDTVRAVDALAALQDFYHREHVTKTQILCAERRLLALFDDRKNELAHLATHGPENPKLEMLEKILQRQFSSSNSPRGIIFTRTRQSAHSLLLWLQQQQGLQTVDIRAQLLIGAGNSSQSTHMTQRDQQEVIQKFQDGTLNLLVATSVAEEGLDIPHCNVVVRYGLLTNEISMVQARGRARADQSVYAFVATEGSRELKRELINEALETLMEQAVAAVQKMDQAEYQAKIRDLQQAALTKRAAQAAQRENQRQQFPVEHVQLLCINCMVAVGHGSDLRKVEGTHHVNVNPNFSNYYNVSRDPVVINKVFKDWKPGGVISCRNCGEVWGLQMIYKSVKLPVLKVRSMLLETPQGRIQAKKWSRVPFSVPDFDFLQHCAENLSDLSLD

SEQ ID NO: 8921 - RNA, 2037 nt, synthetic construct
  misc_feature 1..2037: note = LGP2__Homo_sapiens__EAW60797
  source 1..2037: mol_type = other RNA
atggagcttcggtcctaccaatgggaggtgatcatgcctgccctggagggcaagaatatcatcatctggctgcccacgggtgccgggaagacccgggcggctgcttatgtggccaagcggcacctagagactgtggatggagccaaggtggttgtattggtcaacagggtgcacctggtgacccagcatggtgaagagttcaggcgcatgctggatggacgctggaccgtgacaaccctgagtggggacatgggaccacgtgctggctttggccacctggcccggtgccatgacctgctcatctgcacagcagagcttctgcagatggcactgaccagccccgaggaggaggagcacgtggagctcactgtcttctccctgatcgtggtggatgagtgccaccacacgcacaaggacaccgtctacaacgtcatcatgagccagtacctagaacttaaactccagagggcacagccgctaccccaggtgctgggtctcacagcctccccaggcactggcggggcctccaaactcgatggggccatcaaccacgtcctgcagctctgtgccaacttggacacgtggtgcatcatgtcaccccagaactgctgcccccagctgcaggagcacagccaacagccttgcaaacagtacaacctctgccacaggcgcagccaggatccgtttggggacttgctgaagaagctcatggaccaaatccatgaccacctggagatgcctgagttgagccggaaatttgggacgcaaatgtatgagcagcaggtggtgaagctgagtgaggctgcggctttggctgggcttcaggagcaacgggtgtatgcgcttcacctgaggcgctacaatgacgcgctgctcatccatgacaccgtccgcgccgtggatgccttggctgcgctgcaggatttctatcacagggagcacgtcactaaaacccagatcctgtgtgccgagcgccggctgctggccctgttcgatgaccgcaagaatgagctggcccacttggcaactcatggcccagagaatccaaaactggagatgctggaaaagatcctgcaaaggcagttcagtagctctaacagccctcggggtatcatcttcacccgcacccgccaaagcgcacactccctcctgctctggctccagcagcagcagggcctgcagactgtggacatccgggcccagctactgattggggctgggaacagcagccagagcacccacatgacccagagggaccagcaagaagtgatccagaagttccaagatggaaccctgaaccttctggtggccacgagtgtggcggaggaggggctggacatcccacattgcaatgtggtggtgcgttatgggctcttgaccaatgaaatctccatggtccaggccaggggccgtgcccgggccgatcagagtgtatacgcgtttgtagcaactgaaggtagccgggagctgaagcgggagctgatcaacgaggcgctggagacgctgatggagcaggcagtggctgctgtgcagaaaatggaccaggccgagtaccaggccaagatccgggatctgcagcaggcagccttgaccaagcgggcggcccaggcagcccagcgggagaaccagcggcagcagttcccagtggagcacgtgcagctactctgcatcaactgcatggtggctgtgggccatggcagcgacctgcggaaggtggagggcacccaccatgtcaatgtgaaccccaacttctcgaactactataatgtctccagggatcctgtggtcatcaacaaagtcttcaaggactggaagcctgggggtgtcatcagctgcaggaactgtggggaggtctggggtctgcagatgatctacaagtcagtgaagctgccagtgctcaaagtccgcagcatgctgctggagacccctcaggggcggatccaggccaaaaagtggtcccgcgtgcccttctccgtgcctgactttgacttcctgcagcattgtgccgagaacttgtcggacctctccctggactga

SEQ ID NO: 8922 - RNA, 2037 nt, synthetic construct
  misc_feature 1..2037: note = derived and/or modified sequence opt1 fromLGP2__Homo_sapiens__EAW60797
  source 1..2037: mol_type = other RNA
atggagctgcgcagctaccagtgggaggtgatcatgcccgccctcgagggcaagaacatcatcatctggctgccgaccggggccggcaagacccgggcggccgcctacgtcgccaagcgccacctggagacggtggacggggccaaggtggtcgtgctcgtgaaccgggtccacctggtgacccagcacggcgaggagttccgccggatgctggacgggcgctggaccgtgaccacgctctccggcgacatgggcccccgggcggggttcggccacctggcccgctgccacgacctgctcatctgcaccgccgagctgctgcagatggccctcaccagccccgaggaggaggagcacgtcgagctgaccgtgttctccctgatcgtggtcgacgagtgccaccacacgcacaaggacaccgtgtacaacgtgatcatgagccagtacctcgagctgaagctgcagcgggcgcagcccctcccgcaggtcctggggctgaccgcctcccccggcaccgggggcgccagcaagctcgacggcgccatcaaccacgtgctgcagctgtgcgccaacctcgacacgtggtgcatcatgagcccccagaactgctgcccccagctgcaggagcactcccagcagccgtgcaagcagtacaacctgtgccaccgccggtcccaggaccccttcggggacctcctgaagaagctgatggaccagatccacgaccacctcgagatgcccgagctgagccgcaagttcggcacccagatgtacgagcagcaggtcgtgaagctgtccgaggcggccgccctcgccgggctgcaggagcagcgggtgtacgccctgcacctccgccggtacaacgacgcgctgctgatccacgacaccgtgcgcgccgtcgacgccctcgccgccctgcaggacttctaccaccgggagcacgtgaccaagacgcagatcctgtgcgcggagcgccggctcctggccctgttcgacgaccgcaagaacgagctcgcccacctggccacccacggccccgagaacccgaagctggagatgctcgagaagatcctgcagcggcagttcagctccagcaacagcccccgcggcatcatcttcacccgcacccggcagtccgcccactccctgctgctctggctgcagcagcagcaggggctgcagacggtggacatccgcgcgcagctcctgatcggcgccgggaacagctcccagagcacccacatgacccagcgggaccagcaggaggtcatccagaagttccaggacggcaccctgaacctcctggtggccacgagcgtcgccgaggaggggctggacatcccccactgcaacgtggtggtccgctacggcctcctgaccaacgagatctccatggtgcaggcgcggggccgcgcccgggccgaccagagcgtgtacgccttcgtcgccaccgaggggtcccgcgagctgaagcgggagctcatcaacgaggcgctggagaccctgatggagcaggccgtggccgccgtgcagaagatggaccaggccgagtaccaggcgaagatccgcgacctccagcaggccgccctgacgaagcgggccgcccaggcggcccagcgcgagaaccagcggcagcagttccccgtcgagcacgtgcagctgctctgcatcaactgcatggtggccgtcggccacgggagcgacctgcgcaaggtggagggcacccaccacgtgaacgtcaacccgaacttctccaactactacaacgtgagccgggaccccgtggtcatcaacaaggtgttcaaggactggaagcccgggggcgtgatctcctgccgcaactgcggcgaggtctgggggctgcagatgatctacaagagcgtgaagctccccgtgctgaaggtccggtccatgctgctcgagaccccgcagggccgcatccaggccaagaagtggagccgggtgcccttctccgtgcccgacttcgacttcctgcagcactgcgcggagaacctgagcgacctctccctggactga

SEQ ID NO: 8923 - RNA, 2037 nt, synthetic construct
  misc_feature 1..2037: note = derived and/or modified sequence opt2 fromLGP2__Homo_sapiens__EAW60797
  source 1..2037: mol_type = other RNA
atggagctccgctcctaccagtgggaggtcatcatgcccgccctcgagggcaagaacatcatcatctggctccccaccggcgccggcaagacccgcgccgccgcctacgtcgccaagcgccacctcgagaccgtcgacggcgccaaggtcgtcgtcctcgtcaaccgcgtccacctcgtcacccagcacggcgaggagttccgccgcatgctcgacggccgctggaccgtcaccaccctctccggcgacatgggcccccgcgccggcttcggccacctcgcccgctgccacgacctcctcatctgcaccgccgagctcctccagatggccctcacctcccccgaggaggaggagcacgtcgagctcaccgtcttctccctcatcgtcgtcgacgagtgccaccacacccacaaggacaccgtctacaacgtcatcatgtcccagtacctcgagctcaagctccagcgcgcccagcccctcccccaggtcctcggcctcaccgcctcccccggcaccggcggcgcctccaagctcgacggcgccatcaaccacgtcctccagctctgcgccaacctcgacacctggtgcatcatgtccccccagaactgctgcccccagctccaggagcactcccagcagccctgcaagcagtacaacctctgccaccgccgctcccaggaccccttcggcgacctcctcaagaagctcatggaccagatccacgaccacctcgagatgcccgagctctcccgcaagttcggcacccagatgtacgagcagcaggtcgtcaagctctccgaggccgccgccctcgccggcctccaggagcagcgcgtctacgccctccacctccgccgctacaacgacgccctcctcatccacgacaccgtccgcgccgtcgacgccctcgccgccctccaggacttctaccaccgcgagcacgtcaccaagacccagatcctctgcgccgagcgccgcctcctcgccctcttcgacgaccgcaagaacgagctcgcccacctcgccacccacggccccgagaaccccaagctcgagatgctcgagaagatcctccagcgccagttctcctcctccaactccccccgcggcatcatcttcacccgcacccgccagtccgcccactccctcctcctctggctccagcagcagcagggcctccagaccgtcgacatccgcgcccagctcctcatcggcgccggcaactcctcccagtccacccacatgacccagcgcgaccagcaggaggtcatccagaagttccaggacggcaccctcaacctcctcgtcgccacctccgtcgccgaggagggcctcgacatcccccactgcaacgtcgtcgtccgctacggcctcctcaccaacgagatctccatggtccaggcccgcggccgcgcccgcgccgaccagtccgtctacgccttcgtcgccaccgagggctcccgcgagctcaagcgcgagctcatcaacgaggccctcgagaccctcatggagcaggccgtcgccgccgtccagaagatggaccaggccgagtaccaggccaagatccgcgacctccagcaggccgccctcaccaagcgcgccgcccaggccgcccagcgcgagaaccagcgccagcagttccccgtcgagcacgtccagctcctctgcatcaactgcatggtcgccgtcggccacggctccgacctccgcaaggtcgagggcacccaccacgtcaacgtcaaccccaacttctccaactactacaacgtctcccgcgaccccgtcgtcatcaacaaggtcttcaaggactggaagcccggcggcgtcatctcctgccgcaactgcggcgaggtctggggcctccagatgatctacaagtccgtcaagctccccgtcctcaaggtccgctccatgctcctcgagaccccccagggccgcatccaggccaagaagtggtcccgcgtccccttctccgtccccgacttcgacttcctccagcactgcgccgagaacctctccgacctctccctcgactga

SEQ ID NO: 8924 - RNA, 2037 nt, synthetic construct
  misc_feature 1..2037: note = derived and/or modified sequence opt3 fromLGP2__Homo_sapiens__EAW60797
  source 1..2037: mol_type = other RNA
atggagctgagaagctaccagtgggaagtgatcatgcccgccctcgagggcaagaacattataatctggcttcctaccggggctggaaaaacaagggcagccgcgtatgtcgctaagcggcacctggaaactgttgacggtgccaaagtggtagtgttggtcaatcgcgtgcatttagttacgcaacacggcgaggagttccgacgtatgctggatgggagatggaccgtgacaactctatccggagacatgggcccaagggcaggttttgggcatctcgcccggtgccacgatctgcttatttgtaccgctgaactgttgcagatggcactcacatctccggaggaagaggaacatgtcgagctgaccgtgttctcactgatcgtagttgacgagtgccaccacactcataaggatacagtgtacaacgtcattatgagtcagtatctcgaattaaaactgcagcgcgcccaaccccttcctcaggtgttgggactgaccgctagcccaggcacgggcggggcctccaagctagacggagcgatcaatcacgtgctccagctgtgtgcaaaccttgatacttggtgcataatgtctccccagaattgttgccctcaactgcaggagcattcgcagcagccatgtaagcaatacaacttgtgccacagaaggtcacaggacccctttggtgatctcctgaaaaagttaatggaccagatccacgatcatctggaaatgcctgagctcagccggaaattcggcacccaaatgtatgaacagcaggtcgttaagctgagtgaggccgctgccctggcagggttgcaggagcaacgcgtgtacgctctacaccttcgaagatataatgacgccctcctgattcatgatacagtaagggcggtggacgcccttgcagctctgcaggacttttaccaccgggaacatgtcactaaaacccagatcttgtgtgccgagcgtcgcctcctggctttattcgatgacagaaagaacgaactggcccacctagcaacacacggaccagagaatccgaagctcgaaatgctggagaaaattcttcagaggcaattttcctctagcaactcccccagaggcatcatattcacccgaacgcgccagtcagcccatagtttgctgctctggctgcagcagcaacagggtcttcagactgtggatattagagctcagctgttgatcggggcgggaaatagctctcaatccacacacatgacccagagggaccagcaagaggttattcagaagtttcaggatggcactctcaacctgttagtggcaacatcagtcgccgaagagggcctggacatccctcattgcaatgtggtagttcggtacgggctactcaccaacgaaatcagcatggtgcaggctcgcggacgggccagggcagatcaaagtgtctatgccttcgtggctacggagggttctcgtgaactgaaacgggagcttattaatgaggccttggaaaccctgatggagcaggcagtcgcggctgtgcagaagatggaccaggccgaataccaagcaaaaatacgagatctccagcaggccgctctgacaaagagagccgcacaggctgcccaaagggagaaccagcgccagcaatttccagttgagcacgtgcagttactgtgtatcaactgcatggtagcggtcggccacgggtccgaccttcggaaagtggaaggaactcatcacgttaatgtgaaccccaatttcagcaactattacaatgtctcgagagatcctgtggtaattaacaaggtgtttaaggactggaaaccaggcggtgttatctcttgcaggaattgtggggaggtctggggcttgcagatgatatataagtccgtgaaactccccgtgctgaaggtccgctcaatgctactggaaaccccgcagggacggattcaagccaaaaagtggagtcgagttcctttcagcgtgcccgacttcgattttctccagcattgcgctgagaacctgtccgacctttctttggattga

SEQ ID NO: 8925 - RNA, 2037 nt, synthetic construct
  misc_feature 1..2037: note = derived and/or modified sequence opt4 fromLGP2__Homo_sapiens__EAW60797
  source 1..2037: mol_type = other RNA
atggagctgagaagctaccagtgggaggtgatcatgcccgccctggagggcaagaacatcatcatctggctgcccaccggcgccggcaagaccagagccgccgcctacgtggccaagagacacctggagaccgtggacggcgccaaggtggtggtgctggtgaacagagtgcacctggtgacccagcacggcgaggagttcagaagaatgctggacggcagatggaccgtgaccaccctgagcggcgacatgggccccagagccggcttcggccacctggccagatgccacgacctgctgatctgcaccgccgagctgctgcagatggccctgaccagccccgaggaggaggagcacgtggagctgaccgtgttcagcctgatcgtggtggacgagtgccaccacacccacaaggacaccgtgtacaacgtgatcatgagccagtacctggagctgaagctgcagagagcccagcccctgccccaggtgctgggcctgaccgccagccccggcaccggcggcgccagcaagctggacggcgccatcaaccacgtgctgcagctgtgcgccaacctggacacctggtgcatcatgagcccccagaactgctgcccccagctgcaggagcacagccagcagccctgcaagcagtacaacctgtgccacagaagaagccaggaccccttcggcgacctgctgaagaagctgatggaccagatccacgaccacctggagatgcccgagctgagcagaaagttcggcacccagatgtacgagcagcaggtggtgaagctgagcgaggccgccgccctggccggcctgcaggagcagagagtgtacgccctgcacctgagaagatacaacgacgccctgctgatccacgacaccgtgagagccgtggacgccctggccgccctgcaggacttctaccacagagagcacgtgaccaagacccagatcctgtgcgccgagagaagactgctggccctgttcgacgacagaaagaacgagctggcccacctggccacccacggccccgagaaccccaagctggagatgctggagaagatcctgcagagacagttcagcagcagcaacagccccagaggcatcatcttcaccagaaccagacagagcgcccacagcctgctgctgtggctgcagcagcagcagggcctgcagaccgtggacatcagagcccagctgctgatcggcgccggcaacagcagccagagcacccacatgacccagagagaccagcaggaggtgatccagaagttccaggacggcaccctgaacctgctggtggccaccagcgtggccgaggagggcctggacatcccccactgcaacgtggtggtgagatacggcctgctgaccaacgagatcagcatggtgcaggccagaggcagagccagagccgaccagagcgtgtacgccttcgtggccaccgagggcagcagagagctgaagagagagctgatcaacgaggccctggagaccctgatggagcaggccgtggccgccgtgcagaagatggaccaggccgagtaccaggccaagatcagagacctgcagcaggccgccctgaccaagagagccgcccaggccgcccagagagagaaccagagacagcagttccccgtggagcacgtgcagctgctgtgcatcaactgcatggtggccgtgggccacggcagcgacctgagaaaggtggagggcacccaccacgtgaacgtgaaccccaacttcagcaactactacaacgtgagcagagaccccgtggtgatcaacaaggtgttcaaggactggaagcccggcggcgtgatcagctgcagaaactgcggcgaggtgtggggcctgcagatgatctacaagagcgtgaagctgcccgtgctgaaggtgagaagcatgctgctggagaccccccagggcagaatccaggccaagaagtggagcagagtgcccttcagcgtgcccgacttcgacttcctgcagcactgcgccgagaacctgagcgacctgagcctggactga

SEQ ID NO: 8926 - RNA, 2037 nt, synthetic construct
  misc_feature 1..2037: note = derived and/or modified sequence opt5 fromLGP2__Homo_sapiens__EAW60797
  source 1..2037: mol_type = other RNA
atggagctgagaagctaccagtgggaagtgatcatgcccgccctcgagggcaagaacattatcatttggctgcctaccggggctggaaaaacacgggccgcggcttatgtcgccaagcgccaccttgaaacggttgacggcgccaaagtggtggtcctggtgaatagagttcatctcgtgacccaacacggggaggagttccggcgcatgctggatggaagatggacagtcaccacactttccggcgacatggggccgcgggctggatttggccatctggcccgctgccacgatctcctgatctgtaccgctgaactgctccagatggccctgacatctcccgaggaagaggaacatgtggagcttaccgttttcagcctgattgtggtcgacgagtgccaccacacgcataaggataccgtgtacaacgtgatcatgtcccagtatctcgaactgaaacttcagagagcgcaacctctgccccaggtcctcggcctgacagcctctcctgggaccggaggcgctagcaagctggacggggccatcaatcacgttctccagctgtgtgctaaccttgatacatggtgcattatgtctccccagaattgttgccctcaactgcaggagcattcccagcagccgtgtaagcaatacaacctctgccaccggcgcagccaggacccctttggagatctgcttaaaaagctgatggaccagatccacgatcatctcgaaatgcctgagctgtccagaaaattcggcacccaaatgtatgaacaacaggtggtgaagctgagcgaggccgcggccctcgctgggctgcaggagcagcgggtctacgcccttcatctgcgcagatataatgacgctctcctgattcacgatacggtgcgggccgttgacgcccttgctgcgctgcaggacttttaccaccgcgaacatgtgacaaaaacccagatcctctgtgccgagagacggctgctggctctcttcgatgacagaaagaacgaactggcccaccttgccacacacggacccgagaatcctaagctggaaatgctcgagaaaattctgcagcgccaattttcttccagcaactctccccggggcatcattttcaccagaacccgccagtccgctcatagcctgcttctctggctgcagcagcaacagggcctgcagacagtcgatatccgggcccagctcctgatcggggcgggaaattcttcccaaagcacgcacatgacccagagagaccagcaagaggtgattcagaagtttcaggatggcacacttaacctgctcgttgctacctccgtggccgaagaggggctggacatcccgcattgcaatgtcgtggtccgctacggactgcttacaaacgaaatttctatggtgcaggcccggggcagagctcgcgccgatcaaagcgtttatgctttcgtggccaccgaggggtcccgggaactcaaaagagagctgatcaatgaggcgctggaaacgctcatggagcaggccgtcgctgccgtgcagaagatggaccaggctgaataccaagccaaaattcgcgatctgcagcaggcggcccttacaaagcgggctgcccaggctgcccaaagagagaaccagcggcagcaatttcctgttgagcacgtgcagctgctctgtatcaactgcatggtcgccgtgggacacggcagcgacctgcgcaaagtggaaggcacccatcacgttaatgtcaaccccaatttctctaactattacaatgtgtccagagatcctgtggtcatcaacaaggtgtttaaggactggaaacccgggggagttattagctgccggaattgtggcgaggtgtgggggctgcagatgatctataagtctgtcaaacttcccgtgctcaaggttagaagcatgctgctggaaacccctcagggacgcattcaagctaaaaagtggtcccgggtgccgttctctgtccccgacttcgattttctccagcattgcgcggagaacctgagcgacctttccctggattga

SEQ ID NO: 8927 - protein, 678 aa, synthetic construct; identical to SEQ ID NO: 8920
  REGION 1..678: note = LGP2__Homo_sapiens__Q96C10

SEQ ID NO: 8928 - RNA, 2037 nt, synthetic construct; identical to SEQ ID NO: 8921
  misc_feature 1..2037: note = LGP2__Homo_sapiens__AAH14949
  source 1..2037: mol_type = other RNA

SEQ ID NO: 8929 - RNA, 2037 nt, synthetic construct; identical to SEQ ID NO: 8922
  misc_feature 1..2037: note = derived and/or modified sequence opt1 fromLGP2__Homo_sapiens__AAH14949
  source 1..2037: mol_type = other RNA

SEQ ID NO: 8930 - RNA, 2037 nt, synthetic construct; identical to SEQ ID NO: 8923
  misc_feature 1..2037: note = derived and/or modified sequence opt2 fromLGP2__Homo_sapiens__AAH14949
  source 1..2037: mol_type = other RNA

SEQ ID NO: 8931 - RNA, 2037 nt, synthetic construct; identical to SEQ ID NO: 8924
  misc_feature 1..2037: note = derived and/or modified sequence opt3 fromLGP2__Homo_sapiens__AAH14949
  source 1..2037: mol_type = other RNA

SEQ ID NO: 8932 - RNA, 2037 nt, synthetic construct; identical to SEQ ID NO: 8925
  misc_feature 1..2037: note = derived and/or modified sequence opt4 fromLGP2__Homo_sapiens__AAH14949
  source 1..2037: mol_type = other RNA

SEQ ID NO: 8933 - RNA, 2037 nt, synthetic construct; identical to SEQ ID NO: 8926
  misc_feature 1..2037: note = derived and/or modified sequence opt5 fromLGP2__Homo_sapiens__AAH14949
  source 1..2037: mol_type = other RNA

SEQ ID NO: 8934 - protein, 1024 aa, synthetic construct
  REGION 1..1024: note = l_IPAF__Homo_sapiens__Q9NPP4
MNFIKDNSRALIQRMGMTVIKQITDDLFVWNVLNREEVNIICCEKVEQDAARGIIHMILKKGSESCNLFLKSLKEWNYPLFQDLNGQSLFHQTSEGDLDDLAQDLKDLYHTPSFLNFYPLGEDIDIIFNLKSTFTEPVLWRKDQHHHRVEQLTLNGLLQALQSPCIIEGESGKGKSTLLQRIAMLWGSGKCKALTKFKFVFFLRLSRAQGGLFETLCDQLLDIPGTIRKQTFMAMLLKLRQRVLFLLDGYNEFKPQNCPEIEALIKENHRFKNMVIVTTTTECLRHIRQFGALTAEVGDMTEDSAQALIREVLIKELAEGLLLQIQKSRCLRNLMKTPLFVVITCAIQMGESEFHSHTQTTLFHTFYDLLIQKNKHKHKGVAASDFIRSLDHCGDLALEGVFSHKFDFELQDVSSVNEDVLLTTGLLCKYTAQRFKPKYKFFHKSFQEYTAGRRLSSLLTSHEPEEVTKGNGYLQKMVSISDITSTYSSLLRYTCGSSVEATRAVMKHLAAVYQHGCLLGLSIAKRPLWRQESLQSVKNTTEQEILKAININSFVECGIHLYQESTSKSALSQEFEAFFQGKSLYINSGNIPDYLFDFFEHLPNCASALDFIKLDFYGGAMASWEKAAEDTGGIHMEEAPETYIPSRAVSLFFNWKQEFRTLEVTLRDFSKLNKQDIRYLGKIFSSATSLRLQIKRCAGVAGSLSLVLSTCKNIYSLMVEASPLTIEDERHITSVTNLKTLSIHDLQNQRLPGGLTDSLGNLKNLTKLIMDNIKMNEEDAIKLAEGLKNLKKMCLFHLTHLSDIGEGMDYIVKSLSSEPCDLEEIQLVSCCLSANAVKILAQNLHNLVKLSILDLSENYLEKDGNEALHELIDRMNVLEQLTALMLPWGCDVQGSLSSLLKHLEEVPQLVKLGLKNWRLTDTEIRILGAFFGKNPLKNFQQLNLAGNRVSSDGWLAFMGVFENLKQLVFFDFSTKEFLPDPALVRKLSQVLSKLTFLQEARLVGWQFDDDDLSVITGAFKLVTA

SEQ ID NO: 8935 - RNA, 3075 nt, synthetic construct
  misc_feature 1..3075: note = l_IPAF__Homo_sapiens__AAH31555
  source 1..3075: mol_type = other RNA
atgaatttcataaaggacaatagccgagcccttattcaaagaatgggaatgactgttataaagcaaatcacagatgacctatttgtatggaatgttctgaatcgcgaagaagtaaacatcatttgctgcgagaaggtggagcaggatgctgctagagggatcattcacatgattttgaaaaagggttcagagtcctgtaacctctttcttaaatcccttaaggagtggaactatcctctatttcaggacttgaatggacaaagtctttttcatcagacatcagaaggagacttggacgatttggctcaggatttaaaggacttgtaccataccccatcttttctgaacttttatccccttggtgaagatattgacattatttttaacttgaaaagcaccttcacagaacctgtcctgtggaggaaggaccaacaccatcaccgcgtggagcagctgaccctgaatggcctcctgcaggctcttcagagcccctgcatcattgaaggggaatctggcaaaggcaagtccactctgctgcagcgaattgccatgctctggggctccggaaagtgcaaggctctgaccaagttcaaattcgtcttcttcctccgtctcagcagggcccagggtggactttttgaaaccctctgtgatcaactcctggatatacctggcacaatcaggaagcagacattcatggccatgctgctgaagctgcggcagagggttcttttccttcttgatggctacaatgaattcaagccccagaactgcccagaaatcgaagccctgataaaggaaaaccaccgcttcaagaacatggtcatcgtcaccactaccactgagtgcctgaggcacatacggcagtttggtgccctgactgctgaggtgggggatatgacagaagacagcgcccaggctctcatccgagaagtgctgatcaaggagcttgctgaaggcttgttgctccaaattcagaaatccaggtgcttgaggaatctcatgaagacccctctctttgtggtcatcacttgtgcaatccagatgggtgaaagtgagttccactctcacacacaaacaacgctgttccataccttctatgatctgttgatacagaaaaacaaacacaaacataaaggtgtggctgcaagtgacttcattcggagcctggaccactgtggagacctagctctggagggtgtgttctcccacaagtttgatttcgaactgcaggatgtgtccagcgtgaatgaggatgtcctgctgacaactgggctcctctgtaaatatacagctcaaaggttcaagccaaagtataaattctttcacaagtcattccaggagtacacagcaggacgaagactcagcagtttattgacgtctcatgagccagaggaggtgaccaaggggaatggttacttgcagaaaatggtttccatttcggacattacatccacttatagcagcctgctccggtacacctgtgggtcatctgtggaagccaccagggctgttatgaagcacctcgcagcagtgtatcaacacggctgccttctcggactttccatcgccaagaggcctctctggagacaggaatctttgcaaagtgtgaaaaacaccactgagcaagaaattctgaaagccataaacatcaattcctttgtagagtgtggcatccatttatatcaagagagtacatccaaatcagccctgagccaagaatttgaagctttctttcaaggtaaaagcttatatatcaactcagggaacatccccgattacttatttgacttctttgaacatttgcccaattgtgcaagtgccctggacttcattaaactggacttttatgggggagctatggcttcatgggaaaaggctgcagaagacacaggtggaatccacatggaagaggccccagaaacctacattcccagcagggctgtatctttgttcttcaactggaagcaggaattcaggactctggaggtcacactccgggatttcagcaagttgaataagcaagatatcagatatctggggaaaatattcagctctgccacaagcctcaggctgcaaataaagagatgtgctggtgtggctggaagcctcagtttggtcctcagcacctgtaagaacatttattctctcatggtggaagccagtcccctcaccatagaagatgagaggcacatcacatctgtaacaaacctgaaaaccttgagtattcatgacctacagaatcaacggctgccgggtggtctgactgacagcttgggtaacttgaagaaccttacaaagctcataatggataacataaagatgaatgaagaagatgctataaaactagctgaaggcctgaaaaacctgaagaagatgtgtttatttcatttgacccacttgtctgacattggagagggaatggattacatagtcaagtctctgtcaagtgaaccctgtgaccttgaagaaattcaattagtctcctgctgcttgtctgcaaatgcagtgaaaatcctagctcagaatcttcacaatttggtcaaactgagcattcttgatttatcagaaaattacctggaaaaagatggaaatgaagctcttcatgaactgatcgacaggatgaacgtgctagaacagctcaccgcactgatgctgccctggggctgtgacgtgcaaggcagcctgagcagcctgttgaaacatttggaggaggtcccacaactcgtcaagcttgggttgaaaaactggagactcacagatacagagattagaattttaggtgcattttttggaaagaaccctctgaaaaacttccagcagttgaatttggcgggaaatcgtgtgagcagtgatggatggcttgccttcatgggtgtatttgagaatcttaagcaattagtgttttttgactttagtactaaagaatttctacctgatccagcattagtcagaaaacttagccaagtgttatccaagttaacttttctgcaagaagctaggcttgttgggtggcaatttgatgatgatgatctcagtgttattacaggtgcttttaaactagtaactgcttaa

SEQ ID NO: 8936 - RNA, 3075 nt, synthetic construct
  misc_feature 1..3075: note = derived and/or modified sequence opt1 froml_IPAF__Homo_sapiens__AAH31555
  source 1..3075: mol_type = other RNA
atgaacttcatcaaggacaacagccgcgccctgatccagcggatgggcatgaccgtgatcaagcagatcaccgacgacctcttcgtctggaacgtgctgaaccgcgaggaggtgaacatcatctgctgcgagaaggtcgagcaggacgccgcgcgggggatcatccacatgatcctgaagaagggctccgagagctgcaacctcttcctgaagtccctgaaggagtggaactaccccctcttccaggacctgaacgggcagagcctgttccaccagacgtccgagggcgacctcgacgacctggcccaggacctgaaggacctctaccacaccccgagcttcctgaacttctaccccctgggggaggacatcgacatcatcttcaacctcaagtccaccttcaccgagcccgtgctgtggcgcaaggaccagcaccaccaccgggtggagcagctgacgctcaacggcctgctgcaggccctccagagcccctgcatcatcgagggcgagtccgggaagggcaagagcaccctgctgcagcgcatcgccatgctctgggggtccggcaagtgcaaggccctgaccaagttcaagttcgtcttcttcctgcggctcagccgcgcgcagggcgggctgttcgagaccctgtgcgaccagctcctggacatcccgggcacgatccggaagcagaccttcatggccatgctgctcaagctgcgccagcgggtgctgttcctcctggacgggtacaacgagttcaagccccagaactgccccgagatcgaggccctgatcaaggagaaccaccgcttcaagaacatggtgatcgtcaccaccacgaccgagtgcctccggcacatccgccagttcggcgccctgaccgcggaggtgggggacatgaccgaggactccgcccaggccctgatccgggaggtgctcatcaaggagctggccgagggcctgctcctgcagatccagaagtcccgctgcctgcggaacctcatgaagacgcccctgttcgtcgtgatcacgtgcgccatccagatgggcgagtccgagttccacagccacacccagaccaccctgttccacaccttctacgacctgctcatccagaagaacaagcacaagcacaagggggtggcggcctccgacttcatccgcagcctggaccactgcggcgacctggccctcgagggggtcttctcccacaagttcgacttcgagctgcaggacgtgagcagcgtgaacgaggacgtcctgctcaccaccggcctgctgtgcaagtacacggcccagcggttcaagccgaagtacaagttcttccacaagtccttccaggagtacaccgccgggcgccggctcagctccctgctgaccagccacgagcccgaggaggtgaccaagggcaacggctacctccagaagatggtgtccatcagcgacatcacgtccacctacagctccctgctgcgctacacgtgcgggagctccgtcgaggcgacccgcgccgtgatgaagcacctcgccgccgtgtaccagcacggctgcctgctggggctcagcatcgccaagcggcccctgtggcgccaggagtccctgcagagcgtcaagaacaccaccgagcaggagatcctcaaggcgatcaacatcaactccttcgtggagtgcggcatccacctgtaccaggagagcacctccaagagcgccctgtcccaggagttcgaggccttcttccagggcaagagcctctacatcaacagcgggaacatccccgactacctgttcgacttcttcgagcacctcccgaactgcgcctccgccctggacttcatcaagctggacttctacggcggggcgatggccagctgggagaaggccgccgaggacaccggcgggatccacatggaggaggcgcccgagacgtacatcccctcccgggccgtcagcctgttcttcaactggaagcaggagttccgcaccctcgaggtgaccctgcgggacttctccaagctgaacaagcaggacatccgctacctcggcaagatcttcagctccgccaccagcctgcggctgcagatcaagcgctgcgccggggtggccggctccctcagcctggtcctgtccacgtgcaagaacatctacagcctcatggtggaggcgagccccctgaccatcgaggacgagcggcacatcaccagcgtgaccaacctgaagaccctctccatccacgacctgcagaaccagcgcctgccgggcgggctcacggacagcctgggcaacctgaagaacctcaccaagctgatcatggacaacatcaagatgaacgaggaggacgccatcaagctggccgaggggctcaagaacctgaagaagatgtgcctgttccacctcacccacctgtccgacatcggcgagggcatggactacatcgtcaagagcctgagctccgagccctgcgacctcgaggagatccagctggtgagctgctgcctgtccgccaacgccgtgaagatcctcgcgcagaacctgcacaacctggtcaagctcagcatcctggacctgtccgagaactacctcgagaaggacgggaacgaggccctgcacgagctgatcgaccggatgaacgtgctcgagcagctgaccgccctgatgctcccctggggctgcgacgtgcaggggagcctgtccagcctgctcaagcacctggaggaggtcccccagctggtgaagctcggcctgaagaactggcgcctgacggacaccgagatccggatcctcggggccttcttcggcaagaacccgctgaagaacttccagcagctgaacctcgccggcaaccgcgtgtccagcgacgggtggctggcgttcatgggcgtcttcgagaacctgaagcagctcgtgttcttcgacttctccaccaaggagttcctgcccgaccccgccctggtgcggaagctcagccaggtcctgtccaagctgaccttcctccaggaggcccgcctggtggggtggcagttcgacgacgacgacctgagcgtgatcacgggcgccttcaagctggtcaccgcgtga

SEQ ID NO: 8937 - RNA, 3075 nt, synthetic construct
  misc_feature 1..3075: note = derived and/or modified sequence opt2 froml_IPAF__Homo_sapiens__AAH31555
  source 1..3075: mol_type = other RNA
atgaacttcatcaaggacaactcccgcgccctcatccagcgcatgggcatgaccgtcatcaagcagatcaccgacgacctcttcgtctggaacgtcctcaaccgcgaggaggtcaacatcatctgctgcgagaaggtcgagcaggacgccgcccgcggcatcatccacatgatcctcaagaagggctccgagtcctgcaacctcttcctcaagtccctcaaggagtggaactaccccctcttccaggacctcaacggccagtccctcttccaccagacctccgagggcgacctcgacgacctcgcccaggacctcaaggacctctaccacaccccctccttcctcaacttctaccccctcggcgaggacatcgacatcatcttcaacctcaagtccaccttcaccgagcccgtcctctggcgcaaggaccagcaccaccaccgcgtcgagcagctcaccctcaacggcctcctccaggccctccagtccccctgcatcatcgagggcgagtccggcaagggcaagtccaccctcctccagcgcatcgccatgctctggggctccggcaagtgcaaggccctcaccaagttcaagttcgtcttcttcctccgcctctcccgcgcccagggcggcctcttcgagaccctctgcgaccagctcctcgacatccccggcaccatccgcaagcagaccttcatggccatgctcctcaagctccgccagcgcgtcctcttcctcctcgacggctacaacgagttcaagccccagaactgccccgagatcgaggccctcatcaaggagaaccaccgcttcaagaacatggtcatcgtcaccaccaccaccgagtgcctccgccacatccgccagttcggcgccctcaccgccgaggtcggcgacatgaccgaggactccgcccaggccctcatccgcgaggtcctcatcaaggagctcgccgagggcctcctcctccagatccagaagtcccgctgcctccgcaacctcatgaagacccccctcttcgtcgtcatcacctgcgccatccagatgggcgagtccgagttccactcccacacccagaccaccctcttccacaccttctacgacctcctcatccagaagaacaagcacaagcacaagggcgtcgccgcctccgacttcatccgctccctcgaccactgcggcgacctcgccctcgagggcgtcttctcccacaagttcgacttcgagctccaggacgtctcctccgtcaacgaggacgtcctcctcaccaccggcctcctctgcaagtacaccgcccagcgcttcaagcccaagtacaagttcttccacaagtccttccaggagtacaccgccggccgccgcctctcctccctcctcacctcccacgagcccgaggaggtcaccaagggcaacggctacctccagaagatggtctccatctccgacatcacctccacctactcctccctcctccgctacacctgcggctcctccgtcgaggccacccgcgccgtcatgaagcacctcgccgccgtctaccagcacggctgcctcctcggcctctccatcgccaagcgccccctctggcgccaggagtccctccagtccgtcaagaacaccaccgagcaggagatcctcaaggccatcaacatcaactccttcgtcgagtgcggcatccacctctaccaggagtccacctccaagtccgccctctcccaggagttcgaggccttcttccagggcaagtccctctacatcaactccggcaacatccccgactacctcttcgacttcttcgagcacctccccaactgcgcctccgccctcgacttcatcaagctcgacttctacggcggcgccatggcctcctgggagaaggccgccgaggacaccggcggcatccacatggaggaggcccccgagacctacatcccctcccgcgccgtctccctcttcttcaactggaagcaggagttccgcaccctcgaggtcaccctccgcgacttctccaagctcaacaagcaggacatccgctacctcggcaagatcttctcctccgccacctccctccgcctccagatcaagcgctgcgccggcgtcgccggctccctctccctcgtcctctccacctgcaagaacatctactccctcatggtcgaggcctcccccctcaccatcgaggacgagcgccacatcacctccgtcaccaacctcaagaccctctccatccacgacctccagaaccagcgcctccccggcggcctcaccgactccctcggcaacctcaagaacctcaccaagctcatcatggacaacatcaagatgaacgaggaggacgccatcaagctcgccgagggcctcaagaacctcaagaagatgtgcctcttccacctcacccacctctccgacatcggcgagggcatggactacatcgtcaagtccctctcctccgagccctgcgacctcgaggagatccagctcgtctcctgctgcctctccgccaacgccgtcaagatcctcgcccagaacctccacaacctcgtcaagctctccatcctcgacctctccgagaactacctcgagaaggacggcaacgaggccctccacgagctcatcgaccgcatgaacgtcctcgagcagctcaccgccctcatgctcccctggggctgcgacgtccagggctccctctcctccctcctcaagcacctcgaggaggtcccccagctcgtcaagctcggcctcaagaactggcgcctcaccgacaccgagatccgcatcctcggcgccttcttcggcaagaaccccctcaagaacttccagcagctcaacctcgccggcaaccgcgtctcctccgacggctggctcgccttcatgggcgtcttcgagaacctcaagcagctcgtcttcttcgacttctccaccaaggagttcctccccgaccccgccctcgtccgcaagctctcccaggtcctctccaagctcaccttcctccaggaggcccgcctcgtcggctggcagttcgacgacgacgacctctccgtcatcaccggcgccttcaagctcgtcaccgcctga

SEQ ID NO: 8938 - RNA, 3075 nt, synthetic construct
  misc_feature 1..3075: note = derived and/or modified sequence opt3 froml_IPAF__Homo_sapiens__AAH31555
  source 1..3075: mol_type = other RNA
atgaacttcatcaaggacaatagcagagccctgattcagaggatgggcatgaccgtgataaaacaaatcacagatgacctctttgtctggaacgttcttaatcgggaggaagtgaacattatctgctgtgagaaggtagaacaggatgctgcacgcgggattatccacatgatactgaaaaagggatccgagtcttgcaatttgttcttaaaatcactgaaggaatggaactaccccctatttcaggacctcaatggtcagagtctgttccatcaaactagcgagggcgatcttgacgatctggcccaggacttgaaggatctctatcacacgccttcctttctgaacttctacccactgggggaggacatcgatattatctttaatctcaaatctaccttcacagaaccggtgttatggcgaaaggaccagcatcaccatcgtgtcgagcagctgactcttaacggattgctgcaagcgctacagtcgccctgtattatcgaaggcgagtcaggtaaaggaaagagcaccctcctgcagagaatagctatgctttggggaagtggcaaatgcaaggccctgacaaagtttaaattcgtgtttttcttgaggctctcccgggcacagggcgggctgtttgagaccttatgtgatcaactgctcgacattcctggaactatccgcaagcagacattcatggccatgcttctgaaattgagacagagggttctattcctgctcgacggttataatgaatttaagccacaaaactgccccgagattgaagctctgatcaaagagaatcaccggttcaagaacatggtgatcgtcaccacgactaccgaatgtcttcgccacattcgacagtttggcgcactgacagccgaggtgggggatatgactgaggactctgctcaggccttgataagagaagtactcatcaaagagctggcggaaggattactgctacagattcaaaagtccaggtgcctccggaatctgatgaagacccctcttttcgttgtgatcacatgtgcaatacagatgggcgagagcgaatttcattcacacacccagacgactttgttccatacattttacgatctgctcattcagaaaaacaagcacaaacacaagggtgtcgccgctagtgacttcatccgtagcctggatcattgcggggaccttgccctggagggagtgttttctcacaaattcgattttgagttgcaagacgtgtcctcagtcaacgaagatgttctcctgaccactggcttactgtgtaagtatacagcacagcgcttcaagccaaaatacaagtttttccataagagcttccaggagtataccgctggcagaaggctaagttctctcctgacgtcccacgaacccgaggaagtgaccaaagggaatggataccttcagaaaatggtaagcatctcggacattacatctacttactcctcattgctgcggtatacctgcggtagtagcgtggaggccacacgagcggtcatgaagcatctcgccgcagtgtaccaacacggctgcctgttagggctgtccatcgctaagcgccctctttggagacaggagtctttgcagagcgttaaaaacactaccgaacaggagattctcaaggccataaatatcaactcatttgtggaatgtgggattcacctgtatcaagagagtacatccaaaagcgctctatctcaggagttcgaagcctttttccagggcaagtcactgtacatcaatagtggtaacatcccagattatctctttgacttctttgagcatctgccgaattgcgcaagcgcccttgacttcattaaattggatttttacgggggcgctatggcgtcctgggaaaaggcagccgaggacaccggaggcatacacatggaagaggctcccgagacttatatcccttctagggccgtctcgctgttctttaactggaagcaagagttccggacgttagaagtgacactccgcgattttagcaaactgaataagcaggacattagataccttgggaaaatcttctcctcagcaaccagtctgaggttgcagattaagcgttgtgccggagtagctggttctctcagcctggttctatccacttgcaaaaacatctactcactgatggtggaagccagcccactcaccatagaggatgaacggcatatcacatctgtcaccaatctgaagactctttccattcacgacttgcagaaccaacgactgcccggcgggttaacagatagtctcggaaatctgaaaaaccttacgaagctgatcatggacaatattaagatgaacgaggaggatgcaatcaaactagcggaaggcctcaagaacctgaaaaagatgtgtttgttccacctgacccatttaagcgacataggtgaggggatggattatattgtgaaatctctctcctcagaaccttgcgacctggaggaaatccagcttgtcagttgttgcctgagcgctaatgccgtgaagattttggcacagaacctccacaatctggttaagctatcgatcctggatctttccgagaactacctcgagaaagacggcaatgaagccctgcatgagttgatagacagaatgaacgtgctggaacagttaactgctctcatgctgccatggggatgtgatgtacaaggctctcttagctcactgttgaagcacctcgaggaggtcccccagctggtgaaactagggctgaagaattggaggcttacagacaccgaaatccgcattctcggagcctttttcggtaaaaacccgctgaagaattttcagcagttgaacttagcaggcaatcgggttagttccgatgggtggctggctttcatgggagtgtttgagaacctcaagcaactggtcttctttgacttctctacaaaagaatttcttcctgatcccgccctggtgagaaagttgagccaggtactatccaaactgactttcctccaggaggcgaggctggtgggctggcaatttgacgatgacgatctttcagttatcaccggtgccttcaagttagtcacggcttga

SEQ ID NO: 8939 - RNA, 3075 nt, synthetic construct
  misc_feature 1..3075: note = derived and/or modified sequence opt4 froml_IPAF__Homo_sapiens__AAH31555
  source 1..3075: mol_type = other RNA
atgaacttcatcaaggacaacagcagagccctgatccagagaatgggcatgaccgtgatcaagcagatcaccgacgacctgttcgtgtggaacgtgctgaacagagaggaggtgaacatcatctgctgcgagaaggtggagcaggacgccgccagaggcatcatccacatgatcctgaagaagggcagcgagagctgcaacctgttcctgaagagcctgaaggagtggaactaccccctgttccaggacctgaacggccagagcctgttccaccagaccagcgagggcgacctggacgacctggcccaggacctgaaggacctgtaccacacccccagcttcctgaacttctaccccctgggcgaggacatcgacatcatcttcaacctgaagagcaccttcaccgagcccgtgctgtggagaaaggaccagcaccaccacagagtggagcagctgaccctgaacggcctgctgcaggccctgcagagcccctgcatcatcgagggcgagagcggcaagggcaagagcaccctgctgcagagaatcgccatgctgtggggcagcggcaagtgcaaggccctgaccaagttcaagttcgtgttcttcctgagactgagcagagcccagggcggcctgttcgagaccctgtgcgaccagctgctggacatccccggcaccatcagaaagcagaccttcatggccatgctgctgaagctgagacagagagtgctgttcctgctggacggctacaacgagttcaagccccagaactgccccgagatcgaggccctgatcaaggagaaccacagattcaagaacatggtgatcgtgaccaccaccaccgagtgcctgagacacatcagacagttcggcgccctgaccgccgaggtgggcgacatgaccgaggacagcgcccaggccctgatcagagaggtgctgatcaaggagctggccgagggcctgctgctgcagatccagaagagcagatgcctgagaaacctgatgaagacccccctgttcgtggtgatcacctgcgccatccagatgggcgagagcgagttccacagccacacccagaccaccctgttccacaccttctacgacctgctgatccagaagaacaagcacaagcacaagggcgtggccgccagcgacttcatcagaagcctggaccactgcggcgacctggccctggagggcgtgttcagccacaagttcgacttcgagctgcaggacgtgagcagcgtgaacgaggacgtgctgctgaccaccggcctgctgtgcaagtacaccgcccagagattcaagcccaagtacaagttcttccacaagagcttccaggagtacaccgccggcagaagactgagcagcctgctgaccagccacgagcccgaggaggtgaccaagggcaacggctacctgcagaagatggtgagcatcagcgacatcaccagcacctacagcagcctgctgagatacacctgcggcagcagcgtggaggccaccagagccgtgatgaagcacctggccgccgtgtaccagcacggctgcctgctgggcctgagcatcgccaagagacccctgtggagacaggagagcctgcagagcgtgaagaacaccaccgagcaggagatcctgaaggccatcaacatcaacagcttcgtggagtgcggcatccacctgtaccaggagagcaccagcaagagcgccctgagccaggagttcgaggccttcttccagggcaagagcctgtacatcaacagcggcaacatccccgactacctgttcgacttcttcgagcacctgcccaactgcgccagcgccctggacttcatcaagctggacttctacggcggcgccatggccagctgggagaaggccgccgaggacaccggcggcatccacatggaggaggcccccgagacctacatccccagcagagccgtgagcctgttcttcaactggaagcaggagttcagaaccctggaggtgaccctgagagacttcagcaagctgaacaagcaggacatcagatacctgggcaagatcttcagcagcgccaccagcctgagactgcagatcaagagatgcgccggcgtggccggcagcctgagcctggtgctgagcacctgcaagaacatctacagcctgatggtggaggccagccccctgaccatcgaggacgagagacacatcaccagcgtgaccaacctgaagaccctgagcatccacgacctgcagaaccagagactgcccggcggcctgaccgacagcctgggcaacctgaagaacctgaccaagctgatcatggacaacatcaagatgaacgaggaggacgccatcaagctggccgagggcctgaagaacctgaagaagatgtgcctgttccacctgacccacctgagcgacatcggcgagggcatggactacatcgtgaagagcctgagcagcgagccctgcgacctggaggagatccagctggtgagctgctgcctgagcgccaacgccgtgaagatcctggcccagaacctgcacaacctggtgaagctgagcatcctggacctgagcgagaactacctggagaaggacggcaacgaggccctgcacgagctgatcgacagaatgaacgtgctggagcagctgaccgccctgatgctgccctggggctgcgacgtgcagggcagcctgagcagcctgctgaagcacctggaggaggtgccccagctggtgaagctgggcctgaagaactggagactgaccgacaccgagatcagaatcctgggcgccttcttcggcaagaaccccctgaagaacttccagcagctgaacctggccggcaacagagtgagcagcgacggctggctggccttcatgggcgtgttcgagaacctgaagcagctggtgttcttcgacttcagcaccaaggagttcctgcccgaccccgccctggtgagaaagctgagccaggtgctgagcaagctgaccttcctgcaggaggccagactggtgggctggcagttcgacgacgacgacctgagcgtgatcaccggcgccttcaagctggtgaccgcctga

SEQ ID NO: 8940 - RNA, 3075 nt, synthetic construct
  misc_feature 1..3075: note = derived and/or modified sequence opt5 froml_IPAF__Homo_sapiens__AAH31555
  source 1..3075: mol_type = other RNA
atgaacttcatcaaggacaatagcagagccctgattcagcggatgggcatgaccgtgatcaaacaaattacagatgacctctttgtctggaacgttctgaatcgcgaggaagtgaacatcatttgctgtgagaaggtggaacaggatgctgccagagggatcatccacatgattcttaaaaagggatccgagtcttgcaatctgttcctcaaaagcctgaaggaatggaactaccccctttttcaggacctgaatggccagtccctcttccatcaaacgtctgagggggatctggacgatctggcgcaggacctcaaggatctgtatcacacccctagctttcttaacttctacccgctgggagaggacatcgatattatctttaatctcaaatccacattcaccgaacccgtcctgtggcggaaggaccagcatcaccatcgcgtggagcagcttacactgaacggcctcctgcaagctctgcagtctccttgtattatcgaaggggagagcggaaaaggcaagtccaccctcctgcagagaattgccatgctttggggcagcgggaaatgcaaggccctgacaaagtttaaattcgttttcttcctccggctgtctcgcgctcagggaggcctttttgagaccctgtgtgatcaactcctggacatccccgggacgatcagaaagcagaccttcatggccatgctgctcaaactgcggcagcgcgtgcttttcctgctcgacggatataatgaatttaagcctcaaaactgccccgagattgaagctctgatcaaagagaatcacagattcaagaacatggtcattgtgacaaccacaaccgaatgtcttcggcacatccgccagtttggcgccctgacggcggaggttggggatatgacagaggactccgcccaggctctcattagagaagtgctgatcaaagagctggccgaaggactcctgcttcagatccaaaagagccggtgcctgcgcaatctcatgaagacccctctgttcgtcgtgattacatgtgctatccagatgggcgagtctgaatttcattcccacacccagaccacactgttccatacgttttacgatcttctcattcagaaaaacaagcacaaacacaagggcgtggccgcgagcgacttcatcagatctctggatcattgcggggacctggccctcgagggagtcttttcccacaaattcgattttgagctgcaagacgttagctccgtgaacgaagatgtgcttctgaccacaggcctcctgtgtaagtataccgctcagcggttcaagccgaaatacaagtttttccataaatctttccaggagtatacagccgggagacgcctgagctcccttctcaccagccacgaacccgaggaagtcacgaagggaaatggctacctgcagaaaatggtgtctatttccgacatcacaagcacctactctagcctgctccggtatacctgcgggtcctctgttgaggctacaagagccgtgatgaagcatctggccgctgtctaccaacacggatgccttctgggcctcagcatcgcgaagcgccctctgtggcggcaggagtccctgcagagcgtgaaaaacaccacagaacaggagattcttaaggccatcaatattaactcttttgttgaatgtggcatccacctctatcaagagtccacgagcaaatctgctctgtcccaggagttcgaagcctttttccagggaaagagcctgtacattaattccgggaacatccccgattatctctttgacttctttgagcatctgcctaattgcgcctctgctcttgacttcattaaactggatttttacggcggggccatggcgagctgggaaaaggctgccgaggacaccggaggcatccacatggaagaggcccccgagacatatatcccgtccagagctgtgtctctcttctttaactggaagcaagaatttcgcaccctggaggtcacactgcgggattttagcaaacttaataagcaggacattagatacctcgggaaaatcttctccagcgccacctctctgcgcctgcagattaagcggtgtgctggcgtggccggatccctcagcctggtcctttctacgtgcaaaaacatctactccctgatggtggaagcgagccctctcaccattgaggatgaaagacatatcacatctgttaccaatctgaagacactgagcatccacgaccttcagaaccaacgcctgcccggcgggctcaccgattccctgggaaatctcaaaaacctgacgaaacttattatggacaatatcaagatgaacgaggaggatgccattaagctggctgaaggcctcaagaacctgaaaaagatgtgtctgttccaccttacacatctgagcgacatcggggagggaatggattatattgtgaaatctctctccagcgaaccttgcgacctggaggaaatccagctcgtctcctgttgcctgtctgccaatgctgtgaagatccttgcccagaacctgcacaatctcgttaagctgagcattctggatctttccgagaactacctggagaaagacggcaatgaagcgctccatgagctgatcgaccggatgaacgtgctcgaacagctgaccgcccttatgctgccctgggggtgtgatgtccaaggctctctgagctccctcctgaagcaccttgaggaggtgccccagctggtgaaactcggactgaagaattggagactcacagacaccgaaattcggatcctgggcgcctttttcgggaaaaaccctcttaagaattttcagcagctgaacctggctggaaatcgcgtttctagcgatggctggctcgctttcatgggggtctttgagaacctgaagcaacttgtgttctttgacttctccaccaaagaatttctgccggatcccgccctcgtgagaaagctgagccaggtcctctctaaactgacattccttcaggaggcccggctggtgggatggcaatttgacgatgacgatctgtccgttattacgggcgctttcaagctcgtgaccgcgtga

SEQ ID NO: 8941 - protein, 1025 aa, synthetic construct
  REGION 1..1025: note = MDA5__Homo_sapiens__Q9BYX4
MSNGYSTDENFRYLISCFRARVKMYIQVEPVLDYLTFLPAEVKEQIQRTVATSGNMQAVELLLSTLEKGVWHLGWTREFVEALRRTGSPLAARYMNPELTDLPSPSFENAHDEYLQLLNLLQPTLVDKLLVRDVLDKCMEEELLTIEDRNRIAAAENNGNESGVRELLKRIVQKENWFSAFLNVLRQTGNNELVQELTGSDCSESNAEIENLSQVDGPQVEEQLLSTTVQPNLEKEVWGMENNSSESSFADSSVVSESDTSLAEGSVSCLDESLGHNSNMGSDSGTMGSDSDEENVAARASPEPELQLRPYQMEVAQPALEGKNIIICLPTGSGKTRVAVYIAKDHLDKKKKASEPGKVIVLVNKVLLVEQLFRKEFQPFLKKWYRVIGLSGDTQLKISFPEVVKSCDIIISTAQILENSLLNLENGEDAGVQLSDFSLIIIDECHHTNKEAVYNNIMRHYLMQKLKNNRLKKENKPVIPLPQILGLTASPGVGGATKQAKAEEHILKLCANLDAFTIKTVKENLDQLKNQIQEPCKKFAIADATREDPFKEKLLEIMTRIQTYCQMSPMSDFGTQPYEQWAIQMEKKAAKEGNRKERVCAEHLRKYNEALQINDTIRMIDAYTHLETFYNEEKDKKFAVIEDDSDEGGDDEYCDGDEDEDDLKKPLKLDETDRFLMTLFFENNKMLKRLAENPEYENEKLTKLRNTIMEQYTRTEESARGIIFTKTRQSAYALSQWITENEKFAEVGVKAHHLIGAGHSSEFKPMTQNEQKEVISKFRTGKINLLIATTVAEEGLDIKECNIVIRYGLVTNEIAMVQARGRARADESTYVLVAHSGSGVIEHETVNDFREKMMYKAIHCVQNMKPEEYAHKILELQMQSIMEKKMKTKRNIAKHYKNNPSLITFLCKNCSVLACSGEDIHVIEKMHHVNMTPEFKELYIVRENKALQKKCADYQINGEIICKCGQAWGTMMVHKGLDLPCLKIRNFVVVFKNNSTKKQYKKWVELPITFPNLDYSECCLFSDED

SEQ ID NO: 8942 - RNA, 3078 nt, synthetic construct
  misc_feature 1..3078: note = MDA5__Homo_sapiens__CCDS2217.1
  source 1..3078: mol_type = other RNA
atgtcgaatgggtattccacagacgagaatttccgctatctcatctcgtgcttcagggccagggtgaaaatgtacatccaggtggagcctgtgctggactacctgacctttctgcctgcagaggtgaaggagcagattcagaggacagtcgccacctccgggaacatgcaggcagttgaactgctgctgagcaccttggagaagggagtctggcaccttggttggactcgggaattcgtggaggccctccggagaaccggcagccctctggccgcccgctacatgaaccctgagctcacggacttgccctctccatcgtttgagaacgctcatgatgaatatctccaactgctgaacctccttcagcccactctggtggacaagcttctagttagagacgtcttggataagtgcatggaggaggaactgttgacaattgaagacagaaaccggattgctgctgcagaaaacaatggaaatgaatcaggtgtaagagagctactaaaaaggattgtgcagaaagaaaactggttctctgcatttctgaatgttcttcgtcaaacaggaaacaatgaacttgtccaagagttaacaggctctgattgctcagaaagcaatgcagagattgagaatttatcacaagttgatggtcctcaagtggaagagcaacttctttcaaccacagttcagccaaatctggagaaggaggtctggggcatggagaataactcatcagaatcatcttttgcagattcttctgtagtttcagaatcagacacaagtttggcagaaggaagtgtcagctgcttagatgaaagtcttggacataacagcaacatgggcagtgattcaggcaccatgggaagtgattcagatgaagagaatgtggcagcaagagcatccccggagccagaactccagctcaggccttaccaaatggaagttgcccagccagccttggaagggaagaatatcatcatctgcctccctacagggagtggaaaaaccagagtggctgtttacattgccaaggatcacttagacaagaagaaaaaagcatctgagcctggaaaagttatagttcttgtcaataaggtactgctagttgaacagctcttccgcaaggagttccaaccatttttgaagaaatggtatcgtgttattggattaagtggtgatacccaactgaaaatatcatttccagaagttgtcaagtcctgtgatattattatcagtacagctcaaatccttgaaaactccctcttaaacttggaaaatggagaagatgctggtgttcaattgtcagacttttccctcattatcattgatgaatgtcatcacaccaacaaagaagcagtgtataataacatcatgaggcattatttgatgcagaagttgaaaaacaatagactcaagaaagaaaacaaaccagtgattccccttcctcagatactgggactaacagcttcacctggtgttggaggggccacgaagcaagccaaagctgaagaacacattttaaaactatgtgccaatcttgatgcatttactattaaaactgttaaagaaaaccttgatcaactgaaaaaccaaatacaggagccatgcaagaagtttgccattgcagatgcaaccagagaagatccatttaaagagaaacttctagaaataatgacaaggattcaaacttattgtcaaatgagtccaatgtcagattttggaactcaaccctatgaacaatgggccattcaaatggaaaaaaaagctgcaaaagaaggaaatcgcaaagaacgtgtttgtgcagaacatttgaggaagtacaatgaggccctacaaattaatgacacaattcgaatgatagatgcgtatactcatcttgaaactttctataatgaagagaaagataagaagtttgcagtcatagaagatgatagtgatgagggtggtgatgatgagtattgtgatggtgatgaagatgaggatgatttaaagaaacctttgaaactggatgaaacagatagatttctcatgactttattttttgaaaacaataaaatgttgaaaaggctggctgaaaacccagaatatgaaaatgaaaagctgaccaaattaagaaataccataatggagcaatatactaggactgaggaatcagcacgaggaataatctttacaaaaacacgacagagtgcatatgcgctttcccagtggattactgaaaatgaaaaatttgctgaagtaggagtcaaagcccaccatctgattggagctggacacagcagtgagttcaaacccatgacacagaatgaacaaaaagaagtcattagtaaatttcgcactggaaaaataaatctgcttatcgctaccacagtggcagaagaaggtctggatattaaagaatgtaacattgttatccgttatggtctcgtcaccaatgaaatagccatggtccaggcccgtggtcgagccagagctgatgagagcacctacgtcctggttgctcacagtggttcaggagttatcgaacatgagacagttaatgatttccgagagaagatgatgtataaagctatacattgtgttcaaaatatgaaaccagaggagtatgctcataagattttggaattacagatgcaaagtataatggaaaagaaaatgaaaaccaagagaaatattgccaagcattacaagaataacccatcactaataactttcctttgcaaaaactgcagtgtgctagcctgttctggggaagatatccatgtaattgagaaaatgcatcacgtcaatatgaccccagaattcaaggaactttacattgtaagagaaaacaaagcactgcaaaagaagtgtgccgactatcaaataaatggtgaaatcatctgcaaatgtggccaggcttggggaacaatgatggtgcacaaaggcttagatttgccttgtctcaaaataaggaattttgtagtggttttcaaaaataattcaacaaagaaacaatacaaaaagtgggtagaattacctatcacatttcccaatcttgactattcagaatgctgtttatttagtgatgaggattag

SEQ ID NO: 8943 - RNA, 3078 nt, synthetic construct
  misc_feature 1..3078: note = derived and/or modified sequence opt1 fromMDA5__Homo_sapiens__CCDS2217.1
  source 1..3078: mol_type = other RNA
atgagcaacggctactccaccgacgagaacttccgctacctgatcagctgcttccgggcccgcgtgaagatgtacatccaggtcgagcccgtgctcgactacctgaccttcctgccggccgaggtgaaggagcagatccagcggacggtcgcgacctccgggaacatgcaggccgtggagctcctgctgagcaccctcgagaagggcgtgtggcacctggggtggacccgcgagttcgtcgaggccctgcggcgcacgggcagccccctcgccgcccggtacatgaaccccgagctgaccgacctgccctccccgtccttcgagaacgcgcacgacgagtacctccagctgctgaacctcctgcagcccaccctggtggacaagctcctggtgcgcgacgtcctggacaagtgcatggaggaggagctcctgaccatcgaggaccggaaccgcatcgccgccgccgagaacaacgggaacgagagcggcgtgcgggagctgctcaagcgcatcgtgcagaaggagaactggttctccgcgttcctgaacgtcctgcggcagacgggcaacaacgagctcgtgcaggagctgaccgggagcgactgctccgagagcaacgccgagatcgagaacctgtcccaggtggacggcccccaggtcgaggagcagctcctgagcaccaccgtgcagcccaacctggagaaggaggtgtgggggatggagaacaactccagcgagtccagcttcgccgactccagcgtcgtgagcgagtccgacacgagcctcgccgagggctccgtgagctgcctggacgagtccctggggcacaacagcaacatgggctccgacagcggcaccatggggtccgacagcgacgaggagaacgtcgccgcgcgcgcctccccggagcccgagctccagctgcggccctaccagatggaggtggcccagcccgccctggagggcaagaacatcatcatctgcctcccgaccgggagcggcaagacccgcgtggccgtctacatcgcgaaggaccacctggacaagaagaagaaggcctccgagcccggcaaggtgatcgtcctggtgaacaaggtgctcctggtcgagcagctgttccggaaggagttccagcccttcctcaagaagtggtaccgcgtgatcgggctgagcggcgacacgcagctgaagatctccttccccgaggtggtcaagagctgcgacatcatcatctccaccgcccagatcctcgagaacagcctgctgaacctggagaacggggaggacgccggcgtgcagctctccgacttcagcctgatcatcatcgacgagtgccaccacaccaacaaggaggccgtgtacaacaacatcatgcggcactacctgatgcagaagctcaagaacaaccgcctgaagaaggagaacaagccggtcatccccctgccccagatcctcgggctgaccgcgagccccggcgtgggcggggccacgaagcaggccaaggccgaggagcacatcctgaagctctgcgccaacctggacgcgttcaccatcaagaccgtgaaggagaacctggaccagctcaagaaccagatccaggagccgtgcaagaagttcgccatcgccgacgccacccgggaggaccccttcaaggagaagctgctggagatcatgacgcgcatccagacctactgccagatgtcccccatgagcgacttcggcacccagccctacgagcagtgggcgatccagatggagaagaaggccgccaaggaggggaaccgcaaggagcgggtctgcgccgagcacctccgcaagtacaacgaggccctgcagatcaacgacaccatccggatgatcgacgcgtacacgcacctggagaccttctacaacgaggagaaggacaagaagttcgccgtgatcgaggacgactccgacgagggcggggacgacgagtactgcgacggcgacgaggacgaggacgacctcaagaagccgctgaagctggacgagaccgaccgcttcctcatgaccctgttcttcgagaacaacaagatgctgaagcggctcgccgagaaccccgagtacgagaacgagaagctgacgaagctgcgcaacaccatcatggagcagtacacccggaccgaggagagcgcccgcggcatcatcttcacgaagacccggcagtccgcctacgcgctcagccagtggatcaccgagaacgagaagttcgccgaggtgggggtcaaggcccaccacctgatcggcgccgggcactccagcgagttcaagcccatgacccagaacgagcagaaggaggtgatctccaagttccgcaccggcaagatcaacctgctcatcgccacgaccgtggcggaggaggggctggacatcaaggagtgcaacatcgtcatccggtacggcctggtgaccaacgagatcgccatggtgcaggcccgcggccgggcccgcgcggacgagagcacctacgtcctcgtggcccactccgggagcggcgtgatcgagcacgagacggtcaacgacttccgggagaagatgatgtacaaggccatccactgcgtgcagaacatgaagcccgaggagtacgcccacaagatcctggagctgcagatgcagtccatcatggagaagaagatgaagaccaagcgcaacatcgccaagcactacaagaacaacccgagcctcatcaccttcctgtgcaagaactgctccgtgctggcgtgcagcggggaggacatccacgtcatcgagaagatgcaccacgtgaacatgacccccgagttcaaggagctctacatcgtgcgggagaacaaggccctgcagaagaagtgcgccgactaccagatcaacggcgagatcatctgcaagtgcggccaggcctgggggacgatgatggtccacaagggcctggacctcccctgcctgaagatccgcaacttcgtggtggtcttcaagaacaactccaccaagaagcagtacaagaagtgggtggagctgccgatcaccttccccaacctcgactacagcgagtgctgcctgttcagcgacgaggactga

SEQ ID NO: 8944 - RNA, 3078 nt, synthetic construct
  misc_feature 1..3078: note = derived and/or modified sequence opt2 fromMDA5__Homo_sapiens__CCDS2217.1
  source 1..3078: mol_type = other RNA
atgtccaacggctactccaccgacgagaacttccgctacctcatctcctgcttccgcgcccgcgtcaagatgtacatccaggtcgagcccgtcctcgactacctcaccttcctccccgccgaggtcaaggagcagatccagcgcaccgtcgccacctccggcaacatgcaggccgtcgagctcctcctctccaccctcgagaagggcgtctggcacctcggctggacccgcgagttcgtcgaggccctccgccgcaccggctcccccctcgccgcccgctacatgaaccccgagctcaccgacctcccctccccctccttcgagaacgcccacgacgagtacctccagctcctcaacctcctccagcccaccctcgtcgacaagctcctcgtccgcgacgtcctcgacaagtgcatggaggaggagctcctcaccatcgaggaccgcaaccgcatcgccgccgccgagaacaacggcaacgagtccggcgtccgcgagctcctcaagcgcatcgtccagaaggagaactggttctccgccttcctcaacgtcctccgccagaccggcaacaacgagctcgtccaggagctcaccggctccgactgctccgagtccaacgccgagatcgagaacctctcccaggtcgacggcccccaggtcgaggagcagctcctctccaccaccgtccagcccaacctcgagaaggaggtctggggcatggagaacaactcctccgagtcctccttcgccgactcctccgtcgtctccgagtccgacacctccctcgccgagggctccgtctcctgcctcgacgagtccctcggccacaactccaacatgggctccgactccggcaccatgggctccgactccgacgaggagaacgtcgccgcccgcgcctcccccgagcccgagctccagctccgcccctaccagatggaggtcgcccagcccgccctcgagggcaagaacatcatcatctgcctccccaccggctccggcaagacccgcgtcgccgtctacatcgccaaggaccacctcgacaagaagaagaaggcctccgagcccggcaaggtcatcgtcctcgtcaacaaggtcctcctcgtcgagcagctcttccgcaaggagttccagcccttcctcaagaagtggtaccgcgtcatcggcctctccggcgacacccagctcaagatctccttccccgaggtcgtcaagtcctgcgacatcatcatctccaccgcccagatcctcgagaactccctcctcaacctcgagaacggcgaggacgccggcgtccagctctccgacttctccctcatcatcatcgacgagtgccaccacaccaacaaggaggccgtctacaacaacatcatgcgccactacctcatgcagaagctcaagaacaaccgcctcaagaaggagaacaagcccgtcatccccctcccccagatcctcggcctcaccgcctcccccggcgtcggcggcgccaccaagcaggccaaggccgaggagcacatcctcaagctctgcgccaacctcgacgccttcaccatcaagaccgtcaaggagaacctcgaccagctcaagaaccagatccaggagccctgcaagaagttcgccatcgccgacgccacccgcgaggaccccttcaaggagaagctcctcgagatcatgacccgcatccagacctactgccagatgtcccccatgtccgacttcggcacccagccctacgagcagtgggccatccagatggagaagaaggccgccaaggagggcaaccgcaaggagcgcgtctgcgccgagcacctccgcaagtacaacgaggccctccagatcaacgacaccatccgcatgatcgacgcctacacccacctcgagaccttctacaacgaggagaaggacaagaagttcgccgtcatcgaggacgactccgacgagggcggcgacgacgagtactgcgacggcgacgaggacgaggacgacctcaagaagcccctcaagctcgacgagaccgaccgcttcctcatgaccctcttcttcgagaacaacaagatgctcaagcgcctcgccgagaaccccgagtacgagaacgagaagctcaccaagctccgcaacaccatcatggagcagtacacccgcaccgaggagtccgcccgcggcatcatcttcaccaagacccgccagtccgcctacgccctctcccagtggatcaccgagaacgagaagttcgccgaggtcggcgtcaaggcccaccacctcatcggcgccggccactcctccgagttcaagcccatgacccagaacgagcagaaggaggtcatctccaagttccgcaccggcaagatcaacctcctcatcgccaccaccgtcgccgaggagggcctcgacatcaaggagtgcaacatcgtcatccgctacggcctcgtcaccaacgagatcgccatggtccaggcccgcggccgcgcccgcgccgacgagtccacctacgtcctcgtcgcccactccggctccggcgtcatcgagcacgagaccgtcaacgacttccgcgagaagatgatgtacaaggccatccactgcgtccagaacatgaagcccgaggagtacgcccacaagatcctcgagctccagatgcagtccatcatggagaagaagatgaagaccaagcgcaacatcgccaagcactacaagaacaacccctccctcatcaccttcctctgcaagaactgctccgtcctcgcctgctccggcgaggacatccacgtcatcgagaagatgcaccacgtcaacatgacccccgagttcaaggagctctacatcgtccgcgagaacaaggccctccagaagaagtgcgccgactaccagatcaacggcgagatcatctgcaagtgcggccaggcctggggcaccatgatggtccacaagggcctcgacctcccctgcctcaagatccgcaacttcgtcgtcgtcttcaagaacaactccaccaagaagcagtacaagaagtgggtcgagctccccatcaccttccccaacctcgactactccgagtgctgcctcttctccgacgaggactga

SEQ ID NO: 8945 - RNA, 3078 nt, synthetic construct
  misc_feature 1..3078: note = derived and/or modified sequence opt3 fromMDA5__Homo_sapiens__CCDS2217.1
  source 1..3078: mol_type = other RNA
atgagcaacggctactccaccgacgagaatttcagatatctgatctcttgctttagggcccgggtgaagatgtacattcaggtcgaacccgttctcgattatcttacattcctgcctgctgaggtgaaagaacaaatacagcgcactgtagcaacgtcagggaacatgcaggccgtggagttgttactgagtaccctagaaaagggagtctggcacctcggttggacacgagagtttgtggaggcgctgcgtagaactggcagcccacttgctgccaggtacatgaatccggaactgaccgacttgccctccccttctttcgagaacgcacatgatgaatatctccagctgctgaatctcttacaaccaacactggttgacaaacttttggtgcgggatgtcctggacaagtgtatggaggaggaactactcaccatcgaggatcgcaacagaattgccgctgcagaaaataacgggaatgagtcgggagtgagggaactgcttaaacggatcgtacagaaggagaactggttttcagccttcctgaatgttttgcgccagactggcaacaatgagctcgtgcaggaactgacaggtagcgactgcagtgagtccaacgctgaaattgagaatttatctcaagtcgatgggccccaggtggaagaacagctgctcagcaccacggtgcagcctaaccttgagaaggaagtctggggaatggagaacaattcctcagaaagtagctttgccgactcttccgttgtgtcagagagcgataccagtctggcggaaggctctgtatcctgtttggacgagagcctaggccacaactcgaatatggggtctgattccggaactatgggttcagacagtgacgaggaaaacgtggcagcccgagctagcccagagcccgaactgcaactcagaccttaccagatggaggtcgcccagccagcactggagggcaaaaatatcataatctgccttccgacagggtccggaaagactagggtggctgtttatattgccaaagatcatctggacaagaaaaagaaggcgtctgaacccggcaaagtgatcgtcttggtgaacaaggtactcctggttgagcaattattccggaaagaatttcagcctttcctgaagaaatggtaccgtgtgattggtctaagcggggatacccagctcaagatctcatttccagaggtcgtgaaaagttgtgacataattatctccacagcccagattctggaaaatagccttttgaacctggagaatggagaggatgcaggcgtccaactctctgacttctcactgatcatcattgatgaatgccaccataccaacaaggaggctgtgtacaataacataatgcgccactatcttatgcagaagctgaaaaataacagattgaagaaagaaaataagcccgttatccctctcccacagattctgggcttaacggccagtcccggggtgggaggtgctactaaacaggccaaggcagaggaacacatcctgaagctatgtgccaacctcgacgcttttacaataaaaaccgtaaaggagaacctggatcaacttaaaaatcagattcaggagccgtgcaagaaattcgcgatcgcagacgccactagggaagatcctttcaaggagaagttgctggaaatcatgacacggattcagacctactgtcaaatgagccccatgtccgactttggcacgcagccatatgagcagtgggctatccagatggagaaaaaggccgcaaaagaggggaaccgaaaggagcgcgtctgcgccgaacatctcagaaaatacaatgaggctctgcaaattaacgacaccataaggatgatcgatgcctatacacacttagaaactttctacaatgaggagaaggacaagaaatttgcagtgattgaagatgactctgatgagggaggcgacgatgaatattgtgacggtgatgaggacgaagatgacctgaagaaacctcttaagttggatgagaccgaccggttcctcatgacactgtttttcgagaacaataaaatgctaaagcgcctggcggaaaaccccgagtacgaaaatgagaaactcactaagctgagaaacaccatcatggaacagtacacaaggaccgaggagtcggctcgtgggatcatttttactaagacgcggcagagcgcctatgcactttcccaatggataacagaaaatgagaaattcgccgaagttggcgtgaaggctcatcacttgatcggagccggccactcaagtgagtttaaaccaatgacccagaacgaacagaaggaggtcatttctaaattccgaactgggaagatcaatctgttaattgcaaccacagtggctgaggaaggactcgacatcaaggagtgcaacatagtaatcagatacggtctggtgaccaatgaaattgccatggttcaggcgaggggccgcgcccgggctgatgagagcacttatgtccttgtggcacattccgggtcaggagtgatcgagcacgaaacagtcaacgactttagagagaaaatgatgtacaaggccattcattgcgttcaaaacatgaaacccgaagagtatgctcacaagatcctggaattgcagatgcagagcataatggagaaaaagatgaagacgaaaaggaatattgccaagcattacaaaaacaatccttctctcatcaccttcctgtgtaagaactgctccgtgctagcatgtagtggcgaggatattcacgtgatcgagaaaatgcaccatgtaaatatgactccagaatttaaggaactgtatatagtccgcgagaacaaggcgctccagaaaaagtgcgccgactaccaaatcaatggtgaaattatctgtaaatgcgggcaggcttggggcacaatgatggtgcacaagggactggatcttccgtgtttgaaaattcgaaacttcgttgtggtcttcaagaataacagcaccaaaaagcagtacaagaaatgggtggagctgcccatcacatttcctaatttagactattctgagtgctgtctcttctccgatgaagactga

SEQ ID NO: 8946 - RNA, 3078 nt, synthetic construct
  misc_feature 1..3078: note = derived and/or modified sequence opt4 fromMDA5__Homo_sapiens__CCDS2217.1
  source 1..3078: mol_type = other RNA
atgagcaacggctacagcaccgacgagaacttcagatacctgatcagctgcttcagagccagagtgaagatgtacatccaggtggagcccgtgctggactacctgaccttcctgcccgccgaggtgaaggagcagatccagagaaccgtggccaccagcggcaacatgcaggccgtggagctgctgctgagcaccctggagaagggcgtgtggcacctgggctggaccagagagttcgtggaggccctgagaagaaccggcagccccctggccgccagatacatgaaccccgagctgaccgacctgcccagccccagcttcgagaacgcccacgacgagtacctgcagctgctgaacctgctgcagcccaccctggtggacaagctgctggtgagagacgtgctggacaagtgcatggaggaggagctgctgaccatcgaggacagaaacagaatcgccgccgccgagaacaacggcaacgagagcggcgtgagagagctgctgaagagaatcgtgcagaaggagaactggttcagcgccttcctgaacgtgctgagacagaccggcaacaacgagctggtgcaggagctgaccggcagcgactgcagcgagagcaacgccgagatcgagaacctgagccaggtggacggcccccaggtggaggagcagctgctgagcaccaccgtgcagcccaacctggagaaggaggtgtggggcatggagaacaacagcagcgagagcagcttcgccgacagcagcgtggtgagcgagagcgacaccagcctggccgagggcagcgtgagctgcctggacgagagcctgggccacaacagcaacatgggcagcgacagcggcaccatgggcagcgacagcgacgaggagaacgtggccgccagagccagccccgagcccgagctgcagctgagaccctaccagatggaggtggcccagcccgccctggagggcaagaacatcatcatctgcctgcccaccggcagcggcaagaccagagtggccgtgtacatcgccaaggaccacctggacaagaagaagaaggccagcgagcccggcaaggtgatcgtgctggtgaacaaggtgctgctggtggagcagctgttcagaaaggagttccagcccttcctgaagaagtggtacagagtgatcggcctgagcggcgacacccagctgaagatcagcttccccgaggtggtgaagagctgcgacatcatcatcagcaccgcccagatcctggagaacagcctgctgaacctggagaacggcgaggacgccggcgtgcagctgagcgacttcagcctgatcatcatcgacgagtgccaccacaccaacaaggaggccgtgtacaacaacatcatgagacactacctgatgcagaagctgaagaacaacagactgaagaaggagaacaagcccgtgatccccctgccccagatcctgggcctgaccgccagccccggcgtgggcggcgccaccaagcaggccaaggccgaggagcacatcctgaagctgtgcgccaacctggacgccttcaccatcaagaccgtgaaggagaacctggaccagctgaagaaccagatccaggagccctgcaagaagttcgccatcgccgacgccaccagagaggaccccttcaaggagaagctgctggagatcatgaccagaatccagacctactgccagatgagccccatgagcgacttcggcacccagccctacgagcagtgggccatccagatggagaagaaggccgccaaggagggcaacagaaaggagagagtgtgcgccgagcacctgagaaagtacaacgaggccctgcagatcaacgacaccatcagaatgatcgacgcctacacccacctggagaccttctacaacgaggagaaggacaagaagttcgccgtgatcgaggacgacagcgacgagggcggcgacgacgagtactgcgacggcgacgaggacgaggacgacctgaagaagcccctgaagctggacgagaccgacagattcctgatgaccctgttcttcgagaacaacaagatgctgaagagactggccgagaaccccgagtacgagaacgagaagctgaccaagctgagaaacaccatcatggagcagtacaccagaaccgaggagagcgccagaggcatcatcttcaccaagaccagacagagcgcctacgccctgagccagtggatcaccgagaacgagaagttcgccgaggtgggcgtgaaggcccaccacctgatcggcgccggccacagcagcgagttcaagcccatgacccagaacgagcagaaggaggtgatcagcaagttcagaaccggcaagatcaacctgctgatcgccaccaccgtggccgaggagggcctggacatcaaggagtgcaacatcgtgatcagatacggcctggtgaccaacgagatcgccatggtgcaggccagaggcagagccagagccgacgagagcacctacgtgctggtggcccacagcggcagcggcgtgatcgagcacgagaccgtgaacgacttcagagagaagatgatgtacaaggccatccactgcgtgcagaacatgaagcccgaggagtacgcccacaagatcctggagctgcagatgcagagcatcatggagaagaagatgaagaccaagagaaacatcgccaagcactacaagaacaaccccagcctgatcaccttcctgtgcaagaactgcagcgtgctggcctgcagcggcgaggacatccacgtgatcgagaagatgcaccacgtgaacatgacccccgagttcaaggagctgtacatcgtgagagagaacaaggccctgcagaagaagtgcgccgactaccagatcaacggcgagatcatctgcaagtgcggccaggcctggggcaccatgatggtgcacaagggcctggacctgccctgcctgaagatcagaaacttcgtggtggtgttcaagaacaacagcaccaagaagcagtacaagaagtgggtggagctgcccatcaccttccccaacctggactacagcgagtgctgcctgttcagcgacgaggactga

SEQ ID NO: 8947 - RNA, 3078 nt, synthetic construct
  misc_feature 1..3078: note = derived and/or modified sequence opt5 fromMDA5__Homo_sapiens__CCDS2217.1
  source 1..3078: mol_type = other RNA
atgagcaacggctactccaccgacgagaatttcagatatctgatctcttgctttcgggcccgcgtgaagatgtacattcaggtcgaacccgttctcgattatctgacattccttcctgctgaggtgaaagaacaaatccagagaacggtggccaccagcgggaacatgcaggcggtcgagctgctcctgtccacacttgaaaagggagtgtggcacctgggctggacccgggagtttgttgaggctctccgcagaacagggtctccgctggccgcccggtacatgaatcccgaactgaccgacctccctagcccctccttcgagaacgctcatgatgaatatctgcagcttctgaatctcctgcaacctacacttgtggacaaactgctcgtccgcgatgtgctggacaagtgtatggaggaggaactgctcaccattgaggatagaaaccggatcgccgctgccgaaaataacggaaatgagtctggcgttcgcgaactgcttaaaagaattgtgcagaaggagaactggtttagcgcgttcctgaatgtcctccggcagacggggaacaatgagctggtgcaggaacttaccggatccgactgcagcgagtctaacgccgaaatcgagaatctgtcccaagtggatggcccccaggtcgaagaacagctcctgagcacaaccgttcagcctaacctggagaaggaagtgtggggcatggagaacaattcttccgaaagctcttttgctgactccagcgtggtctccgagtctgatacaagcctcgccgaagggtccgtgagctgtctggacgagtctcttggacacaactccaatatgggcagcgattctgggaccatgggaagcgactccgacgaggaaaacgttgctgcccgcgcgtctccggagcccgaactgcaactcagaccttaccagatggaggtggcccagcccgctctggagggcaaaaatatcattatctgccttcctacggggagcggaaagacacgggtcgccgtgtatattgctaaagatcatctggacaagaaaaagaaggcctccgaacccggcaaagttatcgtgctcgtcaacaaggtgctgctggtcgagcaactcttccgcaaagaatttcagccgttcctgaagaaatggtacagagtgattggccttagcggggatacccagctgaagatctcttttcctgaggttgtgaaatcctgtgacattatcatcagcacagcccagattctcgaaaattctctgctgaaccttgagaatggagaggatgctggcgtccaactctccgacttcagcctgatcattatcgatgaatgccaccataccaacaaggaggcggtgtacaataacattatgcggcactatctgatgcagaagctcaaaaataacagactgaagaaagaaaataagcccgttatccctcttccccagatcctggggctcaccgcctcccccggagtgggcggggctacaaaacaggccaaggccgaggaacacattctgaagctgtgtgctaaccttgacgcctttacgatcaaaaccgtcaaggagaacctcgatcaactgaaaaatcagattcaggagccttgcaagaaattcgcgatcgctgacgccacacgcgaagatccgttcaaggagaagctgctcgaaattatgacccggatccagacatactgtcaaatgtctcccatgagcgactttggaacccagccttatgagcagtgggccatccagatggagaaaaaggctgccaaagagggcaacagaaaggagcgcgtgtgcgctgaacatctgcggaaatacaatgaggcccttcaaattaacgacacgatcagaatgattgatgcgtatacacacctggaaaccttctacaatgaggagaaggacaagaaatttgccgtgatcgaagatgactccgatgagggcggggacgatgaatattgtgacggagatgaggacgaagatgacctcaagaaacccctgaagctggatgagaccgaccgcttccttatgacactctttttcgagaacaataaaatgctgaagcggctggctgaaaaccctgagtacgaaaatgagaaactcaccaagctgagaaacacaattatggaacagtacacgcgcaccgaggagtctgcccggggcatcatttttacaaagaccagacagagcgcttatgccctttcccaatggatcacagaaaatgagaaattcgcggaagttggggtcaaggcccatcacctgatcggagctggccacagctctgagtttaaacccatgacccagaacgaacagaaggaggtgatttccaaattccgcacggggaagatcaatctcctgattgccaccacagtggctgaggaaggcctggacatcaaggagtgcaacattgtcatccggtacggacttgtgaccaatgaaatcgccatggttcaggccagaggccgggctcgcgcggatgagagcacatatgtgctcgtcgcccattctgggtccggagtgattgagcacgaaaccgttaacgactttagagagaaaatgatgtacaaggctatccattgcgtgcaaaacatgaaaccggaagagtatgcccacaagattctggaactgcagatgcagagcatcatggagaaaaagatgaagacgaaacggaatattgccaagcattacaaaaacaatccttctctcatcacattcctgtgtaagaactgcagcgtccttgcttgttccggcgaggatatccacgtgattgagaaaatgcaccatgttaatatgacccccgaatttaaggaactgtatatcgtgagagagaacaaggccctccagaaaaagtgcgcggactaccaaattaatggggaaatcatttgtaaatgcggacaggcttggggcacaatgatggtccacaaggggctggatctgccttgtcttaaaatccgcaacttcgtggtggtcttcaagaataacagcaccaaaaagcagtacaagaaatgggttgagctgcccatcacctttcctaatctcgactattctgagtgctgtctgttctccgatgaagactga

SEQ ID NO: 8948 - protein, 364 aa, synthetic construct
  REGION 1..364: note = MK11__Homo_sapiens__Q15759
MSGPRAGFYRQELNKTVWEVPQRLQGLRPVGSGAYGSVCSAYDARLRQKVAVKKLSRPFQSLIHARRTYRELRLLKHLKHENVIGLLDVFTPATSIEDFSEVYLVTTLMGADLNNIVKCQALSDEHVQFLVYQLLRGLKYIHSAGIIHRDLKPSNVAVNEDCELRILDFGLARQADEEMTGYVATRWYRAPEIMLNWMHYNQTVDIWSVGCIMAELLQGKALFPGSDYIDQLKRIMEVVGTPSPEVLAKISSEHARTYIQSLPPMPQKDLSSIFRGANPLAIDLLGRMLVLDSDQRVSAAEALAHAYFSQYHDPEDEPEAEPYDESVEAKERTLEEWKELTYQEVLSFKPPEPPKPPGSLEIEQ

SEQ ID NO: 8949 - RNA, 1095 nt, synthetic construct
  misc_feature 1..1095: note = MK11__Homo_sapiens__AAC12714
  source 1..1095: mol_type = other RNA
atgtcgggccctcgcgccggcttctaccggcaggagctgaacaagaccgtgtgggaggtgccgcagcggctgcaggggctgcgcccggtgggctccggcgcctacggctccgtctgttcggcctacgacgcccggctgcgccagaaggtggcggtgaagaagctgtcgcgccccttccagtcgctgatccacgcgcgcagaacgtaccgggagctgcggctgctcaagcacctgaagcacgagaacgtcatcgggcttctggacgtcttcacgccggccacgtccatcgaggacttcagcgaagtgtacttggtgaccaccctgatgggcgccgacctgaacaacatcgtcaagtgccaggcgctgagcgacgagcacgttcaattcctggtttaccagctgctgcgcgggctgaagtacatccactcggccgggatcatccaccgggacctgaagcccagcaacgtggctgtgaacgaggactgtgagctcaggatcctggatttcgggctggcgcgccaggcggacgaggagatgaccggctatgtggccacgcgctggtaccgggcacctgagatcatgctcaactggatgcattacaaccaaacagtggatatctggtccgtgggctgcatcatggctgagctgctccagggcaaggccctcttcccgggaagcgactacattgaccagctgaagcgcatcatggaagtggtgggcacacccagccctgaggttctggcaaaaatctcctcggaacacgcccggacatatatccagtccctgccccccatgccccagaaggacctgagcagcatcttccgtggagccaaccccctggccatagacctccttggaaggatgctggtgctggacagtgaccagagggtcagtgcagctgaggcactggcccacgcctacttcagccagtaccacgaccccgaggatgagccagaggccgagccatatgatgagagcgttgaggccaaggagcgcacgctggaggagtggaaggagctcacttaccaggaagtccttagcttcaagcccccagagccaccgaagccacctggcagcctggagattgagcagtga

SEQ ID NO: 8950 - RNA, 1095 nt, synthetic construct
  misc_feature 1..1095: note = derived and/or modified sequence opt1 fromMK11__Homo_sapiens__AAC12714
  source 1..1095: mol_type = other RNA
atgagcggcccccgcgccgggttctaccggcaggagctgaacaagaccgtgtgggaggtcccccagcgcctccagggcctgcggcccgtggggtccggcgcctacgggagcgtgtgctccgcgtacgacgcccgcctgcggcagaaggtcgccgtgaagaagctcagccgccccttccagtccctgatccacgcccggcgcacctaccgggagctgcgcctcctgaagcacctgaagcacgagaacgtgatcggcctcctggacgtcttcacgcccgccaccagcatcgaggacttctccgaggtgtacctggtgaccaccctcatgggcgcggacctgaacaacatcgtcaagtgccaggccctgagcgacgagcacgtgcagttcctcgtgtaccagctgctgcgggggctcaagtacatccactccgccggcatcatccaccgcgacctgaagccgagcaacgtcgccgtgaacgaggactgcgagctgcggatcctcgacttcgggctggcgcgccaggccgacgaggagatgacgggctacgtggccacccggtggtaccgcgcccccgagatcatgctgaactggatgcactacaaccagaccgtcgacatctggtccgtggggtgcatcatggccgagctcctgcagggcaaggcgctgttccccggcagcgactacatcgaccagctcaagcggatcatggaggtggtcgggaccccctccccggaggtgctggccaagatcagctccgagcacgcccgcacgtacatccagagcctgccgcccatgccccagaaggacctctccagcatcttccggggcgccaaccccctggccatcgacctgctcgggcgcatgctggtgctggactccgaccagcgggtcagcgcggccgaggccctcgcccacgcctacttcagccagtaccacgaccccgaggacgagcccgaggcggagccctacgacgagtccgtggaggccaaggagcgcaccctggaggagtggaaggagctgacctaccaggaggtgctcagcttcaagccgcccgagccgcccaagccgcccggctccctggagatcgagcagtga

SEQ ID NO: 8951 - RNA, 1095 nt, synthetic construct
  misc_feature 1..1095: note = derived and/or modified sequence opt2 fromMK11__Homo_sapiens__AAC12714
  source 1..1095: mol_type = other RNA
atgtccggcccccgcgccggcttctaccgccaggagctcaacaagaccgtctgggaggtcccccagcgcctccagggcctccgccccgtcggctccggcgcctacggctccgtctgctccgcctacgacgcccgcctccgccagaaggtcgccgtcaagaagctctcccgccccttccagtccctcatccacgcccgccgcacctaccgcgagctccgcctcctcaagcacctcaagcacgagaacgtcatcggcctcctcgacgtcttcacccccgccacctccatcgaggacttctccgaggtctacctcgtcaccaccctcatgggcgccgacctcaacaacatcgtcaagtgccaggccctctccgacgagcacgtccagttcctcgtctaccagctcctccgcggcctcaagtacatccactccgccggcatcatccaccgcgacctcaagccctccaacgtcgccgtcaacgaggactgcgagctccgcatcctcgacttcggcctcgcccgccaggccgacgaggagatgaccggctacgtcgccacccgctggtaccgcgcccccgagatcatgctcaactggatgcactacaaccagaccgtcgacatctggtccgtcggctgcatcatggccgagctcctccagggcaaggccctcttccccggctccgactacatcgaccagctcaagcgcatcatggaggtcgtcggcaccccctcccccgaggtcctcgccaagatctcctccgagcacgcccgcacctacatccagtccctcccccccatgccccagaaggacctctcctccatcttccgcggcgccaaccccctcgccatcgacctcctcggccgcatgctcgtcctcgactccgaccagcgcgtctccgccgccgaggccctcgcccacgcctacttctcccagtaccacgaccccgaggacgagcccgaggccgagccctacgacgagtccgtcgaggccaaggagcgcaccctcgaggagtggaaggagctcacctaccaggaggtcctctccttcaagccccccgagccccccaagccccccggctccctcgagatcgagcagtga

SEQ ID NO: 8952 - RNA, 1095 nt, synthetic construct
  misc_feature 1..1095: note = derived and/or modified sequence opt3 fromMK11__Homo_sapiens__AAC12714
  source 1..1095: mol_type = other RNA
atgagcggccccagagccgggttctacaggcaggagctgaacaagaccgtgtgggaagtccctcaacggctccagggacttcgcccagttggttccggcgcttatgggtctgtgtgctcagcatacgacgcccgactgcgtcagaaagtagcggtgaagaaattgagtagaccgtttcagagcttaatccacgctaggcggacatatcgcgagctgagactactcaagcatctgaaacacgaaaatgtcattggacttctggatgtgttcactcccgccacgtccatagaggacttttctgaagtttacttggtgaccacactcatgggcgcagatctgaacaatatcgtcaagtgtcaagccctgtcggacgagcatgtgcagttcctcgtatatcagttactgaggggtcttaagtacattcactcagctgggatcattcatcgggatttgaaacctagcaacgttgcagtgaatgaggactgcgaactgcgcatcctagattttggactcgcccgacaggctgacgaggaaatgactggctatgtcgccaccagatggtacagggcgccagagataatgctgaactggatgcactacaatcaaacagtggatatctggagtgtgggctgtattatggcagagcttctgcaggggaaggccttgttccccggatccgactatatcgatcagctcaaacggattatggaagtcgttggtaccccttctccagaggtgctggctaagatcagctccgaacacgcccgtacttacatacagtcattaccccctatgccacaaaaagacctgagtagcatttttcgcggcgcaaacccgctcgctatcgatcttctggggagaatgttggtactagactctgaccagagggtgtccgccgcggaggccctggcacatgcttatttctcacagtaccacgatcccgaagacgagcctgaggccgaaccatatgatgagagcgtcgaagctaaggagcggacactcgaagagtggaaggagctgacctaccaagaagtgcttagttttaaaccccctgagccacccaagccgcctggatctctggaaattgagcagtga

SEQ ID NO: 8953 - RNA, 1095 nt, synthetic construct
  misc_feature 1..1095: note = derived and/or modified sequence opt4 fromMK11__Homo_sapiens__AAC12714
  source 1..1095: mol_type = other RNA
atgagcggccccagagccggcttctacagacaggagctgaacaagaccgtgtgggaggtgccccagagactgcagggcctgagacccgtgggcagcggcgcctacggcagcgtgtgcagcgcctacgacgccagactgagacagaaggtggccgtgaagaagctgagcagacccttccagagcctgatccacgccagaagaacctacagagagctgagactgctgaagcacctgaagcacgagaacgtgatcggcctgctggacgtgttcacccccgccaccagcatcgaggacttcagcgaggtgtacctggtgaccaccctgatgggcgccgacctgaacaacatcgtgaagtgccaggccctgagcgacgagcacgtgcagttcctggtgtaccagctgctgagaggcctgaagtacatccacagcgccggcatcatccacagagacctgaagcccagcaacgtggccgtgaacgaggactgcgagctgagaatcctggacttcggcctggccagacaggccgacgaggagatgaccggctacgtggccaccagatggtacagagcccccgagatcatgctgaactggatgcactacaaccagaccgtggacatctggagcgtgggctgcatcatggccgagctgctgcagggcaaggccctgttccccggcagcgactacatcgaccagctgaagagaatcatggaggtggtgggcacccccagccccgaggtgctggccaagatcagcagcgagcacgccagaacctacatccagagcctgccccccatgccccagaaggacctgagcagcatcttcagaggcgccaaccccctggccatcgacctgctgggcagaatgctggtgctggacagcgaccagagagtgagcgccgccgaggccctggcccacgcctacttcagccagtaccacgaccccgaggacgagcccgaggccgagccctacgacgagagcgtggaggccaaggagagaaccctggaggagtggaaggagctgacctaccaggaggtgctgagcttcaagccccccgagccccccaagccccccggcagcctggagatcgagcagtga

SEQ ID NO: 8954 - RNA, 1095 nt, synthetic construct
  misc_feature 1..1095: note = derived and/or modified sequence opt5 fromMK11__Homo_sapiens__AAC12714
  source 1..1095: mol_type = other RNA
atgagcggccccagagccgggttctaccggcaggagctgaacaagaccgtgtgggaagtccctcaacgcctccagggactgagaccggttggctccggggcttatggatctgtgtgcagcgcctacgacgcgcggcttcgccagaaagtggctgtcaagaaactgtccagaccctttcagtctctcatccacgcccggcgcacatatagagagctgcggcttctgaagcatctcaaacacgaaaatgtgattggcctgctggatgttttcacgcctgccaccagcatcgaggacttttccgaagtgtacctcgtcacaaccctgatgggggctgatcttaacaatattgtgaagtgtcaagccctgtctgacgagcatgttcagttcctcgtgtatcagctgcttcgcggactgaagtacatccacagcgctggcattatccatagagatctcaaaccctccaacgtcgccgtgaatgaggactgcgaactgcggatcctggattttggcctcgcgcgccaggccgacgaggaaatgacagggtatgtggctaccagatggtaccgggcccctgagattatgctgaactggatgcactacaatcaaacagtcgatatctggagcgttggatgtattatggctgagcttctgcagggcaaggccctcttccccgggtctgactatatcgatcagctgaaacgcattatggaagtggtgggaaccccttccccggaggtccttgcgaagatcagctctgaacacgccagaacgtacattcagtccctgccccctatgccccaaaaagacctcagctctatctttcggggcgctaaccctctggccatcgatctgctcgggagaatgctggtgcttgactccgaccagcgcgttagcgctgccgaggccctggctcatgcgtatttctcccagtaccacgatcccgaagacgagccggaggccgaaccttatgatgagtctgtggaagctaaggagcggaccctcgaagagtggaaggagctgacataccaagaagtccttagctttaaaccccctgagcctcccaagcccccgggatccctggaaattgagcagtga

SEQ ID NO: 8955 - protein, 367 aa, synthetic construct
  REGION 1..367: note = MK12__Homo_sapiens__P53778
MSSPPPARSGFYRQEVTKTAWEVRAVYRDLQPVGSGAYGAVCSAVDGRTGAKVAIKKLYRPFQSELFAKRAYRELRLLKHMRHENVIGLLDVFTPDETLDDFTDFYLVMPFMGTDLGKLMKHEKLGEDRIQFLVYQMLKGLRYIHAAGIIHRDLKPGNLAVNEDCELKILDFGLARQADSEMTGYVVTRWYRAPEVILNWMRYTQTVDIWSVGCIMAEMITGKTLFKGSDHLDQLKEIMKVTGTPPAEFVQRLQSDEAKNYMKGLPELEKKDFASILTNASPLAVNLLEKMLVLDAEQRVTAGEALAHPYFESLHDTEDEPQVQKYDDSFDDVDRTLDEWKRVTYKEVLSFKPPRQLGARVSKETPL

SEQ ID NO: 8956 - RNA, 1104 nt, synthetic construct
  misc_feature 1..1104: note = MK12__Homo_sapiens__AAH15741
  source 1..1104: mol_type = other RNA
atgagctctccgccgcccgcccgcagtggcttttaccgccaggaggtgaccaagacggcctgggaggtgcgcgccgtgtaccgggacctgcagcccgtgggctcgggcgcctacggcgcggtgtgctcggccgtggacggccgcaccggcgctaaggtggccatcaagaagctgtatcggcccttccagtccgagctgttcgccaagcgcgcctaccgcgagctgcgcctgctcaagcacatgcgccacgagaacgtgatcgggctgctggacgtattcactcctgatgagaccctggatgacttcacggacttttacctggtgatgccgttcatgggcaccgacctgggcaagctcatgaaacatgagaagctaggcgaggaccggatccagttcctcgtgtaccagatgctgaaggggctgaggtatatccacgctgccggcatcatccacagagacctgaagcccggcaacctggctgtgaacgaagactgtgagctgaagatcctggacttcggcctggccaggcaggcagacagtgagatgactgggtacgtggtgacccggtggtaccgggctcccgaggtcatcttgaattggatgcgctacacgcagacggtggacatctggtccgtgggctgcatcatggcggagatgatcacaggcaagacgctgttcaagggcagcgaccacctggaccagctgaaggagatcatgaaggtgacggggacgcctccggctgagtttgtgcagcggctgcagagcgatgaggccaagaactacatgaagggcctccccgaattggagaagaaggattttgcctctatcctgaccaatgcaagccctctggctgtgaacctcctggagaagatgctggtgctggacgcggagcagcgggtgacggcaggcgaggcgctggcccatccctacttcgagtccctgcacgacacggaagatgagccccaggtccagaagtatgatgactcctttgacgacgttgaccgcacactggatgaatggaagcgtgttacttacaaagaggtgctcagcttcaagcctccccggcagctgggggccagggtctccaaggagacgcctctgtga

SEQ ID NO: 8957 - RNA, 1104 nt, synthetic construct
  misc_feature 1..1104: note = derived and/or modified sequence opt1 fromMK12__Homo_sapiens__AAH15741
  source 1..1104: mol_type = other RNA
atgagcagcccgccgcccgcccgctccggcttctaccggcaggaggtgaccaagaccgcctgggaggtccgcgcggtgtaccgggacctgcagcccgtggggtccggcgcctacggggccgtctgcagcgccgtggacggccgcaccggggccaaggtggcgatcaagaagctctaccggcccttccagtccgagctgttcgccaagcgcgcctaccgggagctgcgcctcctgaagcacatgcggcacgagaacgtcatcggcctgctcgacgtgttcacccccgacgagaccctggacgacttcaccgacttctacctggtgatgcccttcatgggcacggacctcgggaagctgatgaagcacgagaagctgggcgaggaccgcatccagttcctcgtctaccagatgctgaaggggctgcggtacatccacgccgcgggcatcatccaccgcgacctcaagcccgggaacctggccgtgaacgaggactgcgagctgaagatcctcgacttcggcctggcccggcaggccgacagcgagatgaccggctacgtggtcacccgctggtaccgggcccccgaggtgatcctgaactggatgcgctacacccagacggtggacatctggtccgtcgggtgcatcatggcggagatgatcaccggcaagaccctcttcaaggggagcgaccacctggaccagctgaaggagatcatgaaggtgaccggcacgccgcccgccgagttcgtgcagcggctccagtccgacgaggccaagaactacatgaagggcctgcccgagctggagaagaaggacttcgccagcatcctcaccaacgccagccccctggcggtcaacctgctcgagaagatgctggtgctggacgccgagcagcgcgtgaccgccggggaggccctcgcccacccgtacttcgagtccctgcacgacaccgaggacgagccccaggtccagaagtacgacgactccttcgacgacgtggaccggacgctggacgagtggaagcgcgtgacctacaaggaggtcctcagcttcaagccgccccggcagctgggcgcgcgcgtgtccaaggagacgcccctgtga

SEQ ID NO: 8958 - RNA, 1104 nt, synthetic construct
  misc_feature 1..1104: note = derived and/or modified sequence opt2 fromMK12__Homo_sapiens__AAH15741
  source 1..1104: mol_type = other RNA
atgtcctcccccccccccgcccgctccggcttctaccgccaggaggtcaccaagaccgcctgggaggtccgcgccgtctaccgcgacctccagcccgtcggctccggcgcctacggcgccgtctgctccgccgtcgacggccgcaccggcgccaaggtcgccatcaagaagctctaccgccccttccagtccgagctcttcgccaagcgcgcctaccgcgagctccgcctcctcaagcacatgcgccacgagaacgtcatcggcctcctcgacgtcttcacccccgacgagaccctcgacgacttcaccgacttctacctcgtcatgcccttcatgggcaccgacctcggcaagctcatgaagcacgagaagctcggcgaggaccgcatccagttcctcgtctaccagatgctcaagggcctccgctacatccacgccgccggcatcatccaccgcgacctcaagcccggcaacctcgccgtcaacgaggactgcgagctcaagatcctcgacttcggcctcgcccgccaggccgactccgagatgaccggctacgtcgtcacccgctggtaccgcgcccccgaggtcatcctcaactggatgcgctacacccagaccgtcgacatctggtccgtcggctgcatcatggccgagatgatcaccggcaagaccctcttcaagggctccgaccacctcgaccagctcaaggagatcatgaaggtcaccggcaccccccccgccgagttcgtccagcgcctccagtccgacgaggccaagaactacatgaagggcctccccgagctcgagaagaaggacttcgcctccatcctcaccaacgcctcccccctcgccgtcaacctcctcgagaagatgctcgtcctcgacgccgagcagcgcgtcaccgccggcgaggccctcgcccacccctacttcgagtccctccacgacaccgaggacgagccccaggtccagaagtacgacgactccttcgacgacgtcgaccgcaccctcgacgagtggaagcgcgtcacctacaaggaggtcctctccttcaagcccccccgccagctcggcgcccgcgtctccaaggagacccccctctga

SEQ ID NO: 8959 - RNA, 1104 nt, synthetic construct
  misc_feature 1..1104: note = derived and/or modified sequence opt3 fromMK12__Homo_sapiens__AAH15741
  source 1..1104: mol_type = other RNA
atgagctctccccctccagccagatccggcttctacaggcaggaggtgaccaagaccgcttgggaagtccgggcagtttatcgcgacctgcaaccggtggggtcaggagcctacggtgcggtatgcagtgctgtggatggccgaactggggccaaagtcgcaatcaagaaactctatcgtccctttcagagcgagcttttcgccaagagagcttacagggaactgcggttgttaaaacacatgcgccatgagaacgtgattggactgctagacgtttttacgcctgatgaaaccctcgacgatttcacagacttttatctggtgatgccattcatgggcactgatcttggtaagctgatgaagcacgagaaattgggggaggacagaatacagtttctcgtctaccagatgctgaagggactgaggtatatccatgcagccggcattatccaccgggatctcaaacccggcaatttagctgtgaacgaagactgtgagctgaagattcttgatttcgggttggcccgccaagcggactccgaaatgaccggatacgtagttacacgatggtacagagcacctgaggtgatcctgaattggatgaggtatacccagactgtcgatatatggtctgtgggttgcatcatggccgagatgattacaggcaaaaccctatttaaggggtcggaccatctcgaccagctgaaggaaatcatgaaagtgacgggaactccacccgctgagttcgtccagcggcttcaatcagatgaagccaagaactacatgaaaggcctgcctgagttggaaaagaaagactttgcaagcattctcaccaatgctagtccactggccgttaacttactggagaagatgctcgtgcttgatgcggagcagcgtgtaacagccggtgaagcactggctcacccgtatttcgagtccttgcacgacactgaagatgagccccaggtgcagaaatacgacgattcttttgacgatgtcgaccgcaccctagatgaatggaagagagtgacatataaggaggttctgagcttcaaacctccaaggcaactcggggcccgggtgtccaaggagacacccctgtga

SEQ ID NO: 8960 - RNA, 1104 nt, synthetic construct
  misc_feature 1..1104: note = derived and/or modified sequence opt4 fromMK12__Homo_sapiens__AAH15741
  source 1..1104: mol_type = other RNA
atgagcagccccccccccgccagaagcggcttctacagacaggaggtgaccaagaccgcctgggaggtgagagccgtgtacagagacctgcagcccgtgggcagcggcgcctacggcgccgtgtgcagcgccgtggacggcagaaccggcgccaaggtggccatcaagaagctgtacagacccttccagagcgagctgttcgccaagagagcctacagagagctgagactgctgaagcacatgagacacgagaacgtgatcggcctgctggacgtgttcacccccgacgagaccctggacgacttcaccgacttctacctggtgatgcccttcatgggcaccgacctgggcaagctgatgaagcacgagaagctgggcgaggacagaatccagttcctggtgtaccagatgctgaagggcctgagatacatccacgccgccggcatcatccacagagacctgaagcccggcaacctggccgtgaacgaggactgcgagctgaagatcctggacttcggcctggccagacaggccgacagcgagatgaccggctacgtggtgaccagatggtacagagcccccgaggtgatcctgaactggatgagatacacccagaccgtggacatctggagcgtgggctgcatcatggccgagatgatcaccggcaagaccctgttcaagggcagcgaccacctggaccagctgaaggagatcatgaaggtgaccggcaccccccccgccgagttcgtgcagagactgcagagcgacgaggccaagaactacatgaagggcctgcccgagctggagaagaaggacttcgccagcatcctgaccaacgccagccccctggccgtgaacctgctggagaagatgctggtgctggacgccgagcagagagtgaccgccggcgaggccctggcccacccctacttcgagagcctgcacgacaccgaggacgagccccaggtgcagaagtacgacgacagcttcgacgacgtggacagaaccctggacgagtggaagagagtgacctacaaggaggtgctgagcttcaagccccccagacagctgggcgccagagtgagcaaggagacccccctgtga

SEQ ID NO: 8961 - RNA, 1104 nt, synthetic construct
  misc_feature 1..1104: note = derived and/or modified sequence opt5 fromMK12__Homo_sapiens__AAH15741
  source 1..1104: mol_type = other RNA
atgagctctccccctccggccagatccggcttctaccggcaggaggtgaccaagaccgcttgggaagtccgcgccgtttatagagacctgcaacccgtggggagcggagcgtacggcgctgtgtgctccgccgtcgatgggcggacgggagccaaagtggctatcaagaaactctatcgcccttttcagtctgagctgttcgccaagagagcttaccgggaacttcgcctgctcaaacacatgagacatgagaacgttattggcctgcttgacgtgtttacccccgatgaaacactggacgatttcaccgacttttatctcgtcatgcctttcatggggacagatctgggaaagctgatgaagcacgagaaactcggcgaggaccggatccagtttctggtgtaccagatgcttaagggcctgcgctatattcatgccgcggggatcattcacagagatctcaaacccggaaatctggccgttaacgaagactgtgagcttaagatcctggatttcggcctcgctcggcaagccgacagcgaaatgaccgggtacgtggtcacacgctggtacagagctcctgaggtgatcctgaattggatgcggtatacccagacggtggatatttggtccgtcggatgcatcatggccgagatgattaccggcaaaacactgtttaaggggtctgaccatctcgaccagctgaaggaaatcatgaaagttaccggaacaccgcccgcggagttcgtgcagcgccttcaaagcgatgaagccaagaactacatgaaaggcctgcctgagctcgaaaagaaagactttgcttccattctgaccaatgccagcccccttgctgtgaacctgctcgagaagatgctggtcctggatgccgagcagagagtgacggccggcgaagctctcgcgcacccttatttcgagtctctgcacgacacagaagatgagccccaggttcagaaatacgacgattcctttgacgatgtggaccggacccttgatgaatggaagagagtcacatataaggaggtgctgagcttcaaaccgcctcgccaactcggggcccgggtttctaaggagacacccctgtga

SEQ ID NO: 8962 - protein, 365 aa, synthetic construct
  REGION 1..365: note = MK13__Homo_sapiens__O15264
MSLIRKKGFYKQDVNKTAWELPKTYVSPTHVGSGAYGSVCSAIDKRSGEKVAIKKLSRPFQSEIFAKRAYRELLLLKHMQHENVIGLLDVFTPASSLRNFYDFYLVMPFMQTDLQKIMGMEFSEEKIQYLVYQMLKGLKYIHSAGVVHRDLKPGNLAVNEDCELKILDFGLARHADAEMTGYVVTRWYRAPEVILSWMHYNQTVDIWSVGCIMAEMLTGKTLFKGKDYLDQLTQILKVTGVPGTEFVQKLNDKAAKSYIQSLPQTPRKDFTQLFPRASPQAADLLEKMLELDVDKRLTAAQALTHPFFEPFRDPEEETEAQQPFDDSLEHEKLTVDEWKQHIYKEIVNFSPIARKDSRRRSGMKL

SEQ ID NO: 8963 - RNA, 1098 nt, synthetic construct
  misc_feature 1..1098: note = MK13__Homo_sapiens__AAB87639
  source 1..1098: mol_type = other RNA
atgagcctcatccggaaaaagggcttctacaagcaggacgtcaacaagacagcctgggagctgcccaagacctacgtgtccccgacgcacgtcggcagcggggcctatggctccgtgtgctcggccatcgacaagcggtcaggggagaaggtggccatcaagaagctgagccgaccctttcagtccgagatcttcgccaagcgcgcctaccgggagctgctgctgctgaagcacatgcagcatgagaacgtcattgggctcctggatgtcttcaccccagcctcctccctgcgcaacttctatgacttctacctggtgatgcccttcatgcagacggatctgcagaagatcatggggatggagttcagtgaggagaagatccagtacctggtgtatcagatgctcaaaggccttaagtacatccactctgctggggtcgtgcacagggacctgaagccaggcaacctggctgtgaatgaggactgtgaactgaagattctggattttgggctggcgcgacatgcagacgccgagatgactggctacgtggtgacccgctggtaccgagcccccgaggtgatcctcagctggatgcactacaaccagacagtggacatctggtctgtgggctgtatcatggcagagatgctgacagggaaaactctgttcaaggggaaagattacctggaccagctgacccagatcctgaaagtgaccggggtgcctggcacggagtttgtgcagaagctgaacgacaaagcggccaaatcctacatccagtccctgccacagacccccaggaaggatttcactcagctgttcccacgggccagcccccaggctgcggacctgctggagaagatgctggagctagacgtggacaagcgcctgacggccgcgcaggccctcacccatcccttttttgaacccttccgggaccctgaggaagagacggaggcccagcagccgtttgatgattccttagaacacgagaaactcacagtggatgaatggaagcagcacatctacaaggagattgtgaacttcagccccattgcccggaaggactcacggcgccggagtggcatgaagctgtag

SEQ ID NO: 8964 - RNA, 1098 nt, synthetic construct
  misc_feature 1..1098: note = derived and/or modified sequence opt1 fromMK13__Homo_sapiens__AAB87639
  source 1..1098: mol_type = other RNA
atgagcctgatccgcaagaagggcttctacaagcaggacgtgaacaagaccgcctgggagctccccaagacctacgtctccccgacgcacgtggggagcggcgcctacgggtccgtgtgcagcgcgatcgacaagcggtccggcgagaaggtcgccatcaagaagctgagccgccccttccagtccgagatcttcgccaagcgggcctaccgcgagctgctcctgctgaagcacatgcagcacgagaacgtgatcgggctcctggacgtgttcacccccgccagctccctgcggaacttctacgacttctacctcgtcatgcccttcatgcagaccgacctgcagaagatcatgggcatggagttcagcgaggagaagatccagtacctggtgtaccagatgctcaagggcctgaagtacatccactccgcgggggtggtccaccgcgacctgaagccgggcaacctcgccgtgaacgaggactgcgagctgaagatcctggacttcgggctcgcccggcacgccgacgcggagatgaccggctacgtggtcacgcgctggtaccgggcccccgaggtgatcctgagctggatgcactacaaccagaccgtggacatctggtccgtcgggtgcatcatggccgagatgctgaccggcaagaccctcttcaagggcaaggactacctggaccagctgacgcagatcctcaaggtgaccggggtgcccggcaccgagttcgtccagaagctgaacgacaaggccgccaagagctacatccagtccctgccccagaccccgcgcaaggacttcacgcagctgttcccccgggcgagcccccaggccgccgacctcctggagaagatgctcgagctggacgtggacaagcgcctgaccgccgcccaggcgctcacccaccccttcttcgagccgttccgggaccccgaggaggagaccgaggcccagcagcccttcgacgactccctggagcacgagaagctgacggtggacgagtggaagcagcacatctacaaggagatcgtcaacttcagccccatcgcccgcaaggactcccggcgccggagcgggatgaagctctga

SEQ ID NO: 8965 - RNA, 1098 nt, synthetic construct
  misc_feature 1..1098: note = derived and/or modified sequence opt2 fromMK13__Homo_sapiens__AAB87639
  source 1..1098: mol_type = other RNA
atgtccctcatccgcaagaagggcttctacaagcaggacgtcaacaagaccgcctgggagctccccaagacctacgtctcccccacccacgtcggctccggcgcctacggctccgtctgctccgccatcgacaagcgctccggcgagaaggtcgccatcaagaagctctcccgccccttccagtccgagatcttcgccaagcgcgcctaccgcgagctcctcctcctcaagcacatgcagcacgagaacgtcatcggcctcctcgacgtcttcacccccgcctcctccctccgcaacttctacgacttctacctcgtcatgcccttcatgcagaccgacctccagaagatcatgggcatggagttctccgaggagaagatccagtacctcgtctaccagatgctcaagggcctcaagtacatccactccgccggcgtcgtccaccgcgacctcaagcccggcaacctcgccgtcaacgaggactgcgagctcaagatcctcgacttcggcctcgcccgccacgccgacgccgagatgaccggctacgtcgtcacccgctggtaccgcgcccccgaggtcatcctctcctggatgcactacaaccagaccgtcgacatctggtccgtcggctgcatcatggccgagatgctcaccggcaagaccctcttcaagggcaaggactacctcgaccagctcacccagatcctcaaggtcaccggcgtccccggcaccgagttcgtccagaagctcaacgacaaggccgccaagtcctacatccagtccctcccccagaccccccgcaaggacttcacccagctcttcccccgcgcctccccccaggccgccgacctcctcgagaagatgctcgagctcgacgtcgacaagcgcctcaccgccgcccaggccctcacccaccccttcttcgagcccttccgcgaccccgaggaggagaccgaggcccagcagcccttcgacgactccctcgagcacgagaagctcaccgtcgacgagtggaagcagcacatctacaaggagatcgtcaacttctcccccatcgcccgcaaggactcccgccgccgctccggcatgaagctctga

SEQ ID NO: 8966 - RNA, 1098 nt, synthetic construct
  misc_feature 1..1098: note = derived and/or modified sequence opt3 fromMK13__Homo_sapiens__AAB87639
  source 1..1098: mol_type = other RNA
atgagcctgatcagaaagaaaggcttctacaagcaggacgtgaacaaaaccgcctgggagctccccaagacatatgtctcccctactcacgttgggtctggagcttacggttcagtgtgcagtgcaattgataaaaggagcggcgaaaaggtagccataaagaaactttcccggccatttcaatctgagatcttcgcgaagcgcgcttatcgagaactgttgttactgaaacatatgcagcacgagaatgtgattgggctactcgacgtctttacgccggcctcgtcactgcgtaacttctacgatttttatcttgtgatgcccttcatgcagaccgacctgcagaagatcatgggaatggaatttagcgaggagaaaattcaatacttggtttatcagatgctcaagggcctgaagtacatccatagtgccggtgtggtccacagagatctgaaacctgggaatctcgcagtgaacgaagactgtgagttaaagatactggatttcggacttgctaggcatgcagacgccgaaatgacaggctacgtagttactcggtggtatcgcgctccagaggtgatcttgtcctggatgcactacaatcagaccgtcgatatttggtctgtgggctgcatcatggccgagatgctgacagggaaaaccctatttaagggaaaagactatctcgatcagctgactcaaattcttaaggtgacaggtgtccccggcaccgagttcgttcagaaactgaacgacaaggcggcaaagagctacatccagtccttgcctcagacgccaagaaaagattttactcaactcttccccagggcctcacctcaggctgccgacctgttagaaaagatgctggaactcgacgtggataaacggcttaccgcagctcaggccctgacacacccatttttcgagccgttccgcgaccccgaagaggagactgaagcgcaacagccttttgatgacagtttggagcatgaaaagctaaccgtagatgagtggaaacagcacatatataaggaaattgtgaatttcagcccaatcgcccgaaaggactctagaaggcggtccgggatgaaactgtga

SEQ ID NO: 8967 - RNA, 1098 nt, synthetic construct
  misc_feature 1..1098: note = derived and/or modified sequence opt4 fromMK13__Homo_sapiens__AAB87639
  source 1..1098: mol_type = other RNA
atgagcctgatcagaaagaagggcttctacaagcaggacgtgaacaagaccgcctgggagctgcccaagacctacgtgagccccacccacgtgggcagcggcgcctacggcagcgtgtgcagcgccatcgacaagagaagcggcgagaaggtggccatcaagaagctgagcagacccttccagagcgagatcttcgccaagagagcctacagagagctgctgctgctgaagcacatgcagcacgagaacgtgatcggcctgctggacgtgttcacccccgccagcagcctgagaaacttctacgacttctacctggtgatgcccttcatgcagaccgacctgcagaagatcatgggcatggagttcagcgaggagaagatccagtacctggtgtaccagatgctgaagggcctgaagtacatccacagcgccggcgtggtgcacagagacctgaagcccggcaacctggccgtgaacgaggactgcgagctgaagatcctggacttcggcctggccagacacgccgacgccgagatgaccggctacgtggtgaccagatggtacagagcccccgaggtgatcctgagctggatgcactacaaccagaccgtggacatctggagcgtgggctgcatcatggccgagatgctgaccggcaagaccctgttcaagggcaaggactacctggaccagctgacccagatcctgaaggtgaccggcgtgcccggcaccgagttcgtgcagaagctgaacgacaaggccgccaagagctacatccagagcctgccccagacccccagaaaggacttcacccagctgttccccagagccagcccccaggccgccgacctgctggagaagatgctggagctggacgtggacaagagactgaccgccgcccaggccctgacccaccccttcttcgagcccttcagagaccccgaggaggagaccgaggcccagcagcccttcgacgacagcctggagcacgagaagctgaccgtggacgagtggaagcagcacatctacaaggagatcgtgaacttcagccccatcgccagaaaggacagcagaagaagaagcggcatgaagctgtga

SEQ ID NO: 8968 - RNA, 1098 nt, synthetic construct
  misc_feature 1..1098: note = derived and/or modified sequence opt5 fromMK13__Homo_sapiens__AAB87639
  source 1..1098: mol_type = other RNA
atgagcctgatcagaaagaaaggcttctacaagcaggacgtgaacaaaaccgcctgggagctccccaagacatatgtctcccctacgcacgttgggtctggagcttacggcagcgtgtgctccgccattgataaacggtctggggaaaaggtggcgatcaagaaactgagccgcccgtttcaatccgagattttcgctaagagagcctatcgggaacttctgctcctgaaacatatgcagcacgagaatgtcatcggacttctggacgtgtttacccccgcctctagcctccgcaacttctacgatttttatctggttatgcctttcatgcagacagacctgcagaagattatgggcatggaattttccgaggagaaaatccaatacctcgtgtatcagatgctgaaggggcttaagtacatccatagcgctggagtcgtgcacagagatctgaaacccggcaatctcgccgttaacgaagactgtgagctgaagattcttgatttcggcctggctcggcatgccgacgcggaaatgaccgggtacgtggtcacacgctggtatagagcccctgaggtgatcctctcttggatgcactacaatcagaccgtggatatttggtccgtcggatgcatcatggctgagatgctgacaggcaaaaccctgtttaaggggaaagactatctcgatcagctgacgcaaattcttaaggttaccggagtgcccggcacagagttcgtgcagaaactgaacgacaaggccgctaagagctacatccagtctctccctcagaccccgcggaaagattttacacaactgttcccccgcgcctcccctcaggcggccgaccttctggaaaagatgctcgaactggacgtcgataaaagactgaccgctgcccaggctctcacgcacccctttttcgagcctttccgggaccccgaagaggagacagaagcccaacagccgtttgatgacagcctggagcatgaaaaacttaccgtggatgagtggaagcagcacatttataaggaaatcgttaatttctctcctatcgcccgcaaggactccagacggcgcagcgggatgaaactgtga

SEQ ID NO: 8969 - protein, 360 aa, synthetic construct
  REGION 1..360: note = MK14__Homo_sapiens__Q16539
MSQERPTFYRQELNKTIWEVPERYQNLSPVGSGAYGSVCAAFDTKTGLRVAVKKLSRPFQSIIHAKRTYRELRLLKHMKHENVIGLLDVFTPARSLEEFNDVYLVTHLMGADLNNIVKCQKLTDDHVQFLIYQILRGLKYIHSADIIHRDLKPSNLAVNEDCELKILDFGLARHTDDEMTGYVATRWYRAPEIMLNWMHYNQTVDIWSVGCIMAELLTGRTLFPGTDHIDQLKLILRLVGTPGAELLKKISSESARNYIQSLTQMPKMNFANVFIGANPLAVDLLEKMLVLDSDKRITAAQALAHAYFAQYHDPDDEPVADPYDQSFESRDLLIDEWKSLTYDEVISFVPPPLDQEEMES

SEQ ID NO: 8970 - RNA, 1083 nt, synthetic construct
  misc_feature 1..1083: note = MK14__Homo_sapiens__AAA57456
  source 1..1083: mol_type = other RNA
atgtctcaggagaggcccacgttctaccggcaggagctgaacaagacaatctgggaggtgcccgagcgttaccagaacctgtctccagtgggctctggcgcctatggctctgtgtgtgctgcttttgacacaaaaacggggttacgtgtggcagtgaagaagctctccagaccatttcagtccatcattcatgcgaaaagaacctacagagaactgcggttacttaaacatatgaaacatgaaaatgtgattggtctgttggacgtttttacacctgcaaggtctctggaggaattcaatgatgtgtatctggtgacccatctcatgggggcagatctgaacaacattgtgaaatgtcagaagcttacagatgaccatgttcagttccttatctaccaaattctccgaggtctaaagtatatacattcagctgacataattcacagggacctaaaacctagtaatctagctgtgaatgaagactgtgagctgaagattctggattttggactggctcggcacacagatgatgaaatgacaggctacgtggccactaggtggtacagggctcctgagatcatgctgaactggatgcattacaaccagacagttgatatttggtcagtgggatgcataatggccgagctgttgactggaagaacattgtttcctggtacagaccatattgatcagttgaagctcattttaagactcgttggaaccccaggggctgagcttttgaagaaaatctcctcagagtctgcaagaaactatattcagtctttgactcagatgccgaagatgaactttgcgaatgtatttattggtgccaatcccctggctgtcgacttgctggagaagatgcttgtattggactcagataagagaattacagcggcccaagcccttgcacatgcctactttgctcagtaccacgatcctgatgatgaaccagtggccgatccttatgatcagtcctttgaaagcagggacctccttatagatgagtggaaaagcctgacctatgatgaagtcatcagctttgtgccaccaccccttgaccaagaagagatggagtcctga

SEQ ID NO: 8971 - RNA, 1083 nt, synthetic construct
  misc_feature 1..1083: note = derived and/or modified sequence opt1 fromMK14__Homo_sapiens__AAA57456
  source 1..1083: mol_type = other RNA
atgagccaggagcgccccaccttctaccggcaggagctgaacaagaccatctgggaggtgcccgagcgctaccagaacctctcccccgtcggcagcggggcctacggctccgtgtgcgccgcgttcgacacgaagaccgggctgcgggtggccgtcaagaagctgagccgccccttccagtccatcatccacgccaagcggacctaccgcgagctccggctgctgaagcacatgaagcacgagaacgtgatcggcctcctggacgtgttcacccccgcccgcagcctggaggagttcaacgacgtctacctcgtgacgcacctgatgggggccgacctgaacaacatcgtgaagtgccagaagctcaccgacgaccacgtccagttcctgatctaccagatcctgcggggcctcaagtacatccactccgcggacatcatccaccgcgacctgaagccgagcaacctggccgtgaacgaggactgcgagctcaagatcctggacttcggcctggcccggcacaccgacgacgagatgaccgggtacgtggccacgcgctggtaccgggcgcccgagatcatgctcaactggatgcactacaaccagaccgtcgacatctggtccgtgggctgcatcatggccgagctgctgaccgggcgcaccctcttccccggcacggaccacatcgaccagctgaagctgatcctccggctggtggggacccccggcgccgagctgctcaagaagatcagctccgagagcgcccgcaactacatccagtccctgacccagatgccgaagatgaacttcgccaacgtcttcatcggcgcgaaccccctggccgtggacctcctggagaagatgctggtgctcgacagcgacaagcggatcaccgccgcccaggccctggcgcacgcctacttcgcccagtaccacgaccccgacgacgagcccgtcgccgacccgtacgaccagtccttcgagagccgcgacctgctcatcgacgagtggaagtccctgacgtacgacgaggtgatcagcttcgtgcccccgcccctggaccaggaggagatggagtcctga

SEQ ID NO: 8972 - RNA, 1083 nt, synthetic construct
  misc_feature 1..1083: note = derived and/or modified sequence opt2 fromMK14__Homo_sapiens__AAA57456
  source 1..1083: mol_type = other RNA
atgtcccaggagcgccccaccttctaccgccaggagctcaacaagaccatctgggaggtccccgagcgctaccagaacctctcccccgtcggctccggcgcctacggctccgtctgcgccgccttcgacaccaagaccggcctccgcgtcgccgtcaagaagctctcccgccccttccagtccatcatccacgccaagcgcacctaccgcgagctccgcctcctcaagcacatgaagcacgagaacgtcatcggcctcctcgacgtcttcacccccgcccgctccctcgaggagttcaacgacgtctacctcgtcacccacctcatgggcgccgacctcaacaacatcgtcaagtgccagaagctcaccgacgaccacgtccagttcctcatctaccagatcctccgcggcctcaagtacatccactccgccgacatcatccaccgcgacctcaagccctccaacctcgccgtcaacgaggactgcgagctcaagatcctcgacttcggcctcgcccgccacaccgacgacgagatgaccggctacgtcgccacccgctggtaccgcgcccccgagatcatgctcaactggatgcactacaaccagaccgtcgacatctggtccgtcggctgcatcatggccgagctcctcaccggccgcaccctcttccccggcaccgaccacatcgaccagctcaagctcatcctccgcctcgtcggcacccccggcgccgagctcctcaagaagatctcctccgagtccgcccgcaactacatccagtccctcacccagatgcccaagatgaacttcgccaacgtcttcatcggcgccaaccccctcgccgtcgacctcctcgagaagatgctcgtcctcgactccgacaagcgcatcaccgccgcccaggccctcgcccacgcctacttcgcccagtaccacgaccccgacgacgagcccgtcgccgacccctacgaccagtccttcgagtcccgcgacctcctcatcgacgagtggaagtccctcacctacgacgaggtcatctccttcgtccccccccccctcgaccaggaggagatggagtcctga

SEQ ID NO: 8973 - RNA, 1083 nt, synthetic construct
  misc_feature 1..1083: note = derived and/or modified sequence opt3 fromMK14__Homo_sapiens__AAA57456
  source 1..1083: mol_type = other RNA
atgagccaggagagacccaccttctacaggcaagaactgaacaagacaatatgggaggtgcctgaacggtatcagaatctctccccagtcggctctggggcctacggatcagtttgcgctgcatttgacactaaaacgggtcttcgcgtggccgtaaagaaactgagtcgaccgttccagagcattatacacgcgaagcgtacctatagagagttgaggttactgaaacatatgaagcacgaaaacgtgatcggcctactcgatgtctttacacccgctcggtccctggaggagttcaatgacgtgtaccttgttactcatctgatgggggccgatttgaacaatattgtgaagtgtcagaaactcaccgacgatcacgtccaatttctgatctatcagattctgcgcggactcaagtacatccattctgcagacataatccacagagatttaaaaccttcgaacctggccgtgaatgaagactgcgagcttaagattttggatttcggcctggctaggcacacagacgatgaaatgaccggttatgtagcaactcggtggtaccgcgccccagagatcatgctaaactggatgcattacaatcagacagttgacatttggtcagtggggtgtatcatggctgagctcctgaccggacgaacgctttttcccggcactgatcacatagaccagctgaaattgattctcagactggtcggcacccctggggccgaattactgaagaagatcagcagtgagtccgcgaggaactatattcaatctctcacacagatgccaaaaatgaatttcgcaaacgtgtttatcggagccaatccccttgctgtggacctgttggaaaagatgctagtcctggatagcgacaaacggatcactgccgcacaggctctcgcccatgcgtacttcgcccagtatcacgatcctgacgatgagccagttgcagacccgtacgatcaatcctttgaatcacgtgacctgcttattgatgagtggaagagtctgacctatgacgaggtgatcagcttcgtaccccctccattggatcaggaagagatggaatcttga

SEQ ID NO: 8974 - RNA, 1083 nt, synthetic construct
  misc_feature 1..1083: note = derived and/or modified sequence opt4 fromMK14__Homo_sapiens__AAA57456
  source 1..1083: mol_type = other RNA
atgagccaggagagacccaccttctacagacaggagctgaacaagaccatctgggaggtgcccgagagataccagaacctgagccccgtgggcagcggcgcctacggcagcgtgtgcgccgccttcgacaccaagaccggcctgagagtggccgtgaagaagctgagcagacccttccagagcatcatccacgccaagagaacctacagagagctgagactgctgaagcacatgaagcacgagaacgtgatcggcctgctggacgtgttcacccccgccagaagcctggaggagttcaacgacgtgtacctggtgacccacctgatgggcgccgacctgaacaacatcgtgaagtgccagaagctgaccgacgaccacgtgcagttcctgatctaccagatcctgagaggcctgaagtacatccacagcgccgacatcatccacagagacctgaagcccagcaacctggccgtgaacgaggactgcgagctgaagatcctggacttcggcctggccagacacaccgacgacgagatgaccggctacgtggccaccagatggtacagagcccccgagatcatgctgaactggatgcactacaaccagaccgtggacatctggagcgtgggctgcatcatggccgagctgctgaccggcagaaccctgttccccggcaccgaccacatcgaccagctgaagctgatcctgagactggtgggcacccccggcgccgagctgctgaagaagatcagcagcgagagcgccagaaactacatccagagcctgacccagatgcccaagatgaacttcgccaacgtgttcatcggcgccaaccccctggccgtggacctgctggagaagatgctggtgctggacagcgacaagagaatcaccgccgcccaggccctggcccacgcctacttcgcccagtaccacgaccccgacgacgagcccgtggccgacccctacgaccagagcttcgagagcagagacctgctgatcgacgagtggaagagcctgacctacgacgaggtgatcagcttcgtgcccccccccctggaccaggaggagatggagagctga

SEQ ID NO: 8975 - RNA, 1083 nt, synthetic construct
  misc_feature 1..1083: note = derived and/or modified sequence opt5 fromMK14__Homo_sapiens__AAA57456
  source 1..1083: mol_type = other RNA
atgagccaggagagacccaccttctaccggcaagaactgaacaagacaatctgggaggtgcctgaacgctatcagaatctctccccggtcggctctggggcctacggaagcgtttgcgctgcctttgacacgaagaccggcctgagagtggcggtgaagaaactttcccggcccttccagtctattatccacgctaagcgcacatatagagagctgcggctcctgaaacatatgaagcacgaaaacgtcattgggcttctggatgtgtttacccctgcccgcagcctcgaggagttcaatgacgtttacctggtgacacatctgatgggagccgatctcaacaatatcgtcaagtgtcagaaactgaccgacgatcacgtgcaatttcttatttatcagatcctgagaggcctcaagtacatccattccgctgacattatccaccgggatctgaaaccctctaaccttgccgttaatgaagactgcgagctgaagattctcgatttcgggctggctcgccacacagacgatgaaatgaccggatatgtggccacgagatggtaccgggcgcctgagatcatgctgaactggatgcattacaatcagaccgtcgacatttggagcgtgggctgtatcatggccgagctcctgacaggccgcaccctttttcccgggacagatcacattgaccagctgaaactcatcctgagacttgtgggaacccctggcgctgaactgctcaagaagatctccagcgagtctgcccggaactatattcaatccctgacgcagatgccgaaaatgaatttcgctaacgtctttatcggggccaatcccctggcggttgacctcctggaaaagatgcttgtgctggatagcgacaaacgcattacagccgctcaggccctcgctcatgcctacttcgcccagtatcacgatcctgacgatgagcccgtggctgacccttacgatcaatcttttgaatccagagacctgcttatcgatgagtggaaaagcctgacctatgacgaggtcatttctttcgtgcccccgcctctcgatcaggaagagatggaatcctga

SEQ ID NO: 8976 - protein, 393 aa, synthetic construct [sequence omitted]

SEQ ID NO: 8977 - RNA, 1182 nt, synthetic construct
  misc_feature 1..1182: note = MKK1__Homo_sapiens__AAA36318
  source 1..1182: mol_type = other RNA
atgcccaagaagaagccgacgcccatccagctgaacccggcccccgacggctctgcagttaacgggaccagctctgcggagaccaacttggaggccttgcagaagaagctggaggagctagagcttgatgagcagcagcgaaagcgccttgaggcctttcttacccagaagcagaaggtgggagaactgaaggatgacgactttgagaagatcagtgagctgggggctggcaatggcggtgtggtgttcaaggtctcccacaagccttctggcctggtcatggccagaaagctaattcatctggagatcaaacccgcaatccggaaccagatcataagggagctgcaggttctgcatgagtgcaactctccgtacatcgtgggcttctatggtgcgttctacagcgatggcgagatcagtatctgcatggagcacatggatggaggttctctggatcaagtcctgaagaaagctggaagaattcctgaacaaattttaggaaaagttagcattgctgtaataaaaggcctgacatatctgagggagaagcacaagatcatgcacagagatgtcaagccctccaacatcctagtcaactcccgtggggagatcaagctctgtgactttggggtcagcgggcagctcatcgactccatggccaactccttcgtgggcacaaggtcctacatgtcgccagaaagactccaggggactcattactctgtgcagtcagacatctggagcatgggactgtctctggtagagatggcggttgggaggtatcccatccctcctccagatgccaaggagctggagctgatgtttgggtgccaggtggaaggagatgcggctgagaccccacccaggccaaggacccccgggaggccccttagctcatacggaatggacagccgacctcccatggcaatttttgagttgttggattacatagtcaacgagcctcctccaaaactgcccagtggagtgttcagtctggaatttcaagattttgtgaataaatgcttaataaaaaaccccgcagagagagcagatttgaagcaactcatggttcatgcttttatcaagagatctgatgctgaggaagtggattttgcaggttggctctgctccaccatcggccttaaccagcccagcacaccaacccatgctgctggcgtctaa

SEQ ID NO: 8978 - RNA, 1182 nt, synthetic construct
  misc_feature 1..1182: note = derived and/or modified sequence opt1 fromMKK1__Homo_sapiens__AAA36318
  source 1..1182: mol_type = other RNA
atgcccaagaagaagcccacccccatccagctgaaccccgcccccgacggcagcgccgtgaacgggacctccagcgcggagacgaacctcgaggccctgcagaagaagctggaggagctcgagctggacgagcagcagcgcaagcggctggaggccttcctcacccagaagcagaaggtcggcgagctgaaggacgacgacttcgagaagatctccgagctgggggccggcaacgggggcgtggtgttcaaggtcagccacaagccgtccggcctcgtgatggcccgcaagctgatccacctggagatcaagcccgcgatccggaaccagatcatccgcgagctccaggtgctgcacgagtgcaacagcccctacatcgtcgggttctacggcgccttctactccgacggggagatcagcatctgcatggagcacatggacggcgggtccctggaccaggtgctcaagaaggccggccggatccccgagcagatcctgggcaaggtgagcatcgccgtcatcaaggggctgacctacctccgcgagaagcacaagatcatgcaccgggacgtgaagccgtccaacatcctggtgaacagccgcggcgagatcaagctgtgcgacttcggggtctccggccagctcatcgacagcatggcgaactccttcgtgggcacccggagctacatgtcccccgagcgcctgcaggggacgcactacagcgtgcagtccgacatctggagcatgggcctgagcctcgtcgagatggccgtggggcggtaccccatcccgccgcccgacgccaaggagctggagctgatgttcggctgccaggtggagggggacgccgccgagaccccgccccgcccccggacccccggccgccccctctccagctacggcatggactcccggccgcccatggcgatcttcgagctgctggactacatcgtcaacgagcccccgcccaagctccccagcggggtgttctccctggagttccaggacttcgtgaacaagtgcctgatcaagaaccccgccgagcgcgccgacctcaagcagctgatggtccacgccttcatcaagcggagcgacgccgaggaggtggacttcgcgggctggctgtgctccaccatcgggctcaaccagcccagcacgcccacccacgccgccggcgtgtga

SEQ ID NO: 8979 - RNA, 1182 nt, synthetic construct
  misc_feature 1..1182: note = derived and/or modified sequence opt2 fromMKK1__Homo_sapiens__AAA36318
  source 1..1182: mol_type = other RNA
atgcccaagaagaagcccacccccatccagctcaaccccgcccccgacggctccgccgtcaacggcacctcctccgccgagaccaacctcgaggccctccagaagaagctcgaggagctcgagctcgacgagcagcagcgcaagcgcctcgaggccttcctcacccagaagcagaaggtcggcgagctcaaggacgacgacttcgagaagatctccgagctcggcgccggcaacggcggcgtcgtcttcaaggtctcccacaagccctccggcctcgtcatggcccgcaagctcatccacctcgagatcaagcccgccatccgcaaccagatcatccgcgagctccaggtcctccacgagtgcaactccccctacatcgtcggcttctacggcgccttctactccgacggcgagatctccatctgcatggagcacatggacggcggctccctcgaccaggtcctcaagaaggccggccgcatccccgagcagatcctcggcaaggtctccatcgccgtcatcaagggcctcacctacctccgcgagaagcacaagatcatgcaccgcgacgtcaagccctccaacatcctcgtcaactcccgcggcgagatcaagctctgcgacttcggcgtctccggccagctcatcgactccatggccaactccttcgtcggcacccgctcctacatgtcccccgagcgcctccagggcacccactactccgtccagtccgacatctggtccatgggcctctccctcgtcgagatggccgtcggccgctaccccatccccccccccgacgccaaggagctcgagctcatgttcggctgccaggtcgagggcgacgccgccgagacccccccccgcccccgcacccccggccgccccctctcctcctacggcatggactcccgcccccccatggccatcttcgagctcctcgactacatcgtcaacgagcccccccccaagctcccctccggcgtcttctccctcgagttccaggacttcgtcaacaagtgcctcatcaagaaccccgccgagcgcgccgacctcaagcagctcatggtccacgccttcatcaagcgctccgacgccgaggaggtcgacttcgccggctggctctgctccaccatcggcctcaaccagccctccacccccacccacgccgccggcgtctga

SEQ ID NO: 8980 - RNA, 1182 nt, synthetic construct
  misc_feature 1..1182: note = derived and/or modified sequence opt3 fromMKK1__Homo_sapiens__AAA36318
  source 1..1182: mol_type = other RNA
atgcccaagaaaaagcctaccccaatccagctgaacccggcccccgacggcagcgctgtgaatgggacatcctctgcagagactaacctcgaagcccttcagaaaaagctggaggaattggagttagatgaacaacagagaaaaaggctggaggcgttcctaacgcagaagcaaaaggtcggagagctcaaagacgatgactttgaaaagatttcagagctgggtgctggcaatgggggagttgtgttcaaagtaagtcacaagcctagcggccttgtgatggcccggaaactgatacatttggaaatcaagccagcaattcgcaaccagatcattcgagagctccaggtcctgcacgagtgcaattccccctacatcgtgggtttttatggggccttctactctgatggagaaatatcgatctgtatggagcatatggacggcggctcactggatcaggttctcaagaaagctgggcgtattcctgaacaaatcttaggaaaggtgagcattgcagtcatcaaaggtctgacctatcttagagagaagcacaaaataatgcatagggacgtgaagccaagtaacattttggtaaattcccggggcgaaatcaaactgtgcgattttggggtttctggacagctaattgacagcatggccaactccttcgtgggcacacgctcatacatgagtcccgagagactccagggtactcactatagcgtccagtctgatatctggtccatggggctgtcacttgtggagatggctgtgggaaggtaccctatcccaccgcccgacgccaaggaactggagttgatgtttggctgtcaagtcgaaggcgatgcggcagagacccctccacggccccgcacacctgggcgaccactcagcagttatggaatggactctagacccccgatggccattttcgaactgttagactacatagttaatgagcctcccccaaagctgccttccggtgtgtttagcctcgagttccaggattttgtaaacaaatgccttatcaagaatcccgctgaaagggccgacctgaaacagttgatggtgcacgcattcattaagcggtcggatgctgaggaagtcgactttgccggctggctatgttctaccatcgggctgaaccaaccatccactcccacacatgcggccggagtgtga

SEQ ID NO: 8981 - RNA, 1182 nt, synthetic construct
  misc_feature 1..1182: note = derived and/or modified sequence opt4 fromMKK1__Homo_sapiens__AAA36318
  source 1..1182: mol_type = other RNA
atgcccaagaagaagcccacccccatccagctgaaccccgcccccgacggcagcgccgtgaacggcaccagcagcgccgagaccaacctggaggccctgcagaagaagctggaggagctggagctggacgagcagcagagaaagagactggaggccttcctgacccagaagcagaaggtgggcgagctgaaggacgacgacttcgagaagatcagcgagctgggcgccggcaacggcggcgtggtgttcaaggtgagccacaagcccagcggcctggtgatggccagaaagctgatccacctggagatcaagcccgccatcagaaaccagatcatcagagagctgcaggtgctgcacgagtgcaacagcccctacatcgtgggcttctacggcgccttctacagcgacggcgagatcagcatctgcatggagcacatggacggcggcagcctggaccaggtgctgaagaaggccggcagaatccccgagcagatcctgggcaaggtgagcatcgccgtgatcaagggcctgacctacctgagagagaagcacaagatcatgcacagagacgtgaagcccagcaacatcctggtgaacagcagaggcgagatcaagctgtgcgacttcggcgtgagcggccagctgatcgacagcatggccaacagcttcgtgggcaccagaagctacatgagccccgagagactgcagggcacccactacagcgtgcagagcgacatctggagcatgggcctgagcctggtggagatggccgtgggcagataccccatccccccccccgacgccaaggagctggagctgatgttcggctgccaggtggagggcgacgccgccgagaccccccccagacccagaacccccggcagacccctgagcagctacggcatggacagcagaccccccatggccatcttcgagctgctggactacatcgtgaacgagcccccccccaagctgcccagcggcgtgttcagcctggagttccaggacttcgtgaacaagtgcctgatcaagaaccccgccgagagagccgacctgaagcagctgatggtgcacgccttcatcaagagaagcgacgccgaggaggtggacttcgccggctggctgtgcagcaccatcggcctgaaccagcccagcacccccacccacgccgccggcgtgtga

SEQ ID NO: 8982 - RNA, 1182 nt, synthetic construct
  misc_feature 1..1182: note = derived and/or modified sequence opt5 fromMKK1__Homo_sapiens__AAA36318
  source 1..1182: mol_type = other RNA
atgcccaagaaaaagcctaccccgatccagctgaaccccgcccctgacggcagcgctgtgaatgggacatcctctgccgagacgaacctcgaagcgctgcaaaagaaacttgaggaactggagctcgatgaacagcagagaaaacggctggaggctttccttacccagaagcaaaaggtcggagagctgaaagacgatgactttgaaaagattagcgagctcggcgccgggaatggaggcgttgtgttcaaagtgtcccacaagccctctgggctggtcatggcccgcaaactgatccatctcgaaattaagcctgctatcagaaaccagattatccgggagcttcaggtgctgcacgagtgcaatagcccctacatcgttggattttatggcgccttctactccgatggcgaaatttctatctgtatggagcatatggacgggggaagcctggatcaggtgctcaagaaagctggccgcattcctgaacaaatcctggggaaggtctccattgccgtgatcaaaggacttacatatctgagagagaagcacaaaattatgcatcgggacgttaagccgagcaacatcctcgtcaattctcgcggcgaaatcaaactgtgcgattttggggtgtccggacagctgattgacagcatggcgaactctttcgtgggcaccagatcctacatgagccccgagcggctccagggcacacactattctgtgcagtccgatatctggagcatggggctgtcccttgtcgagatggccgttggacgctaccctattccccctcccgacgctaaggaactggagctcatgtttggctgtcaagtggaaggggatgccgctgagaccccgcctagaccccggacacctggacgccccctgtctagctatggcatggactccagaccccctatggccatcttcgaacttctggactacattgtgaatgagccgccccctaagctccccagcggggtcttttctctggagttccaggattttgtgaacaaatgcctgatcaagaatcctgcggaacgggccgacctcaaacagctgatggttcacgctttcatcaagcgctccgatgccgaggaagtggactttgctggatggctttgtagcaccattggcctgaaccaaccctctacgccgacccatgccgccggcgtctga

SEQ ID NO: 8983 - protein, 347 aa, synthetic construct
  REGION 1..347: note = MKK3__Homo_sapiens__P46734
MESPASSQPASMPQSKGKSKRKKDLRISCMSKPPAPNPTPPRNLDSRTFITIGDRNFEVEADDLVTISELGRGAYGVVEKVRHAQSGTIMAVKRIRATVNSQEQKRLLMDLDINMRTVDCFYTVTFYGALFREGDVWICMELMDTSLDKFYRKVLDKNMTIPEDILGEIAVSIVRALEHLHSKLSVIHRDVKPSNVLINKEGHVKMCDFGISGYLVDSVAKTMDAGCKPYMAPERINPELNQKGYNVKSDVWSLGITMIEMAILRFPYESWGTPFQQLKQVVEEPSPQLPADRFSPEFVDFTAQCLRKNPAERMSYLELMEHPFFTLHKTKKTDIAAFVKEILGEDS

SEQ ID NO: 8984 - RNA, 1044 nt, synthetic construct
  misc_feature 1..1044: note = MKK3__Homo_sapiens__AAH32478
  source 1..1044: mol_type = other RNA
atggagtcgcccgcctcgagccagcccgccagcatgccccagtccaaaggaaaatccaagaggaagaaggatctacggatatcctgcatgtccaagccacccgcacccaaccccacacccccccggaacctggactcccggaccttcatcaccattggagacagaaactttgaggtggaggctgatgacttggtgaccatctcagaactgggccgtggagcctatggggtggtagagaaggtgcggcacgcccagagcggcaccatcatggccgtgaagcggatccgggccaccgtgaactcacaggagcagaagcggctgctcatggacctggacatcaacatgcgcacggtcgactgcttctacactgtcaccttctacggggcactattcagagagggagacgtgtggatctgcatggagctcatggacacatccttggacaagttctaccggaaggtgctggataaaaacatgacaattccagaggacatccttggggagattgctgtgtctatcgtgcgggccctggagcatctgcacagcaagctgtcggtgatccacagagatgtgaagccctccaatgtccttatcaacaaggagggccatgtgaagatgtgtgactttggcatcagtggctacttggtggactctgtggccaagacgatggatgccggctgcaagccctacatggcccctgagaggatcaacccagagctgaaccagaagggctacaatgtcaagtccgacgtctggagcctgggcatcaccatgattgagatggccatcctgcggttcccttacgagtcctgggggaccccgttccagcagctgaagcaggtggtggaggagccgtccccccagctcccagccgaccgtttctcccccgagtttgtggacttcactgctcagtgcctgaggaagaaccccgcagagcgtatgagctacctggagctgatggagcaccccttcttcaccttgcacaaaaccaagaagacggacattgctgccttcgtgaaggagatcctgggagaagactcatag

SEQ ID NO: 8985 - RNA, 1044 nt, synthetic construct
  misc_feature 1..1044: note = derived and/or modified sequence opt1 fromMKK3__Homo_sapiens__AAH32478
  source 1..1044: mol_type = other RNA
atggagagccccgcctccagccagccggcctccatgccccagagcaagggcaagtccaagcgcaagaaggacctgcggatcagctgcatgtccaagccgcccgcgcccaaccccaccccgccccgcaacctcgacagccggaccttcatcacgatcggggaccgcaacttcgaggtggaggccgacgacctggtcaccatctccgagctgggccgcggggcctacggcgtggtggagaaggtccggcacgcccagagcgggaccatcatggccgtgaagcggatccgcgcgaccgtgaactcccaggagcagaagcggctcctgatggacctggacatcaacatgcgcacggtcgactgcttctacaccgtgaccttctacggcgccctcttccgggagggcgacgtgtggatctgcatggagctgatggacaccagcctggacaagttctaccgcaaggtcctcgacaagaacatgacgatccccgaggacatcctgggggagatcgccgtgtccatcgtgcgggccctggagcacctccacagcaagctgtccgtcatccaccgcgacgtgaagcccagcaacgtgctgatcaacaaggagggccacgtcaagatgtgcgacttcgggatctccggctacctcgtggacagcgtggcgaagaccatggacgccgggtgcaagccctacatggcccccgagcggatcaacccggagctgaaccagaagggctacaacgtcaagtccgacgtgtggagcctgggcatcaccatgatcgagatggccatcctccgcttcccctacgagagctgggggacccccttccagcagctgaagcaggtcgtggaggagccctccccgcagctgcccgccgaccggttcagccccgagttcgtggacttcacggcgcagtgcctccgcaagaaccccgccgagcggatgtcctacctggagctgatggagcacccgttcttcaccctccacaagaccaagaagaccgacatcgccgccttcgtgaaggagatcctgggcgaggacagctga

SEQ ID NO: 8986 - RNA, 1044 nt, synthetic construct
  misc_feature 1..1044: note = derived and/or modified sequence opt2 fromMKK3__Homo_sapiens__AAH32478
  source 1..1044: mol_type = other RNA
atggagtcccccgcctcctcccagcccgcctccatgccccagtccaagggcaagtccaagcgcaagaaggacctccgcatctcctgcatgtccaagccccccgcccccaaccccacccccccccgcaacctcgactcccgcaccttcatcaccatcggcgaccgcaacttcgaggtcgaggccgacgacctcgtcaccatctccgagctcggccgcggcgcctacggcgtcgtcgagaaggtccgccacgcccagtccggcaccatcatggccgtcaagcgcatccgcgccaccgtcaactcccaggagcagaagcgcctcctcatggacctcgacatcaacatgcgcaccgtcgactgcttctacaccgtcaccttctacggcgccctcttccgcgagggcgacgtctggatctgcatggagctcatggacacctccctcgacaagttctaccgcaaggtcctcgacaagaacatgaccatccccgaggacatcctcggcgagatcgccgtctccatcgtccgcgccctcgagcacctccactccaagctctccgtcatccaccgcgacgtcaagccctccaacgtcctcatcaacaaggagggccacgtcaagatgtgcgacttcggcatctccggctacctcgtcgactccgtcgccaagaccatggacgccggctgcaagccctacatggcccccgagcgcatcaaccccgagctcaaccagaagggctacaacgtcaagtccgacgtctggtccctcggcatcaccatgatcgagatggccatcctccgcttcccctacgagtcctggggcacccccttccagcagctcaagcaggtcgtcgaggagccctccccccagctccccgccgaccgcttctcccccgagttcgtcgacttcaccgcccagtgcctccgcaagaaccccgccgagcgcatgtcctacctcgagctcatggagcaccccttcttcaccctccacaagaccaagaagaccgacatcgccgccttcgtcaaggagatcctcggcgaggactcctga

SEQ ID NO: 8987 - RNA, 1044 nt, synthetic construct
  misc_feature 1..1044: note = derived and/or modified sequence opt3 fromMKK3__Homo_sapiens__AAH32478
  source 1..1044: mol_type = other RNA
atggagagccccgcctcctctcagcctgcttcaatgccacaaagtaagggcaaaagcaagaggaaaaaggacctgagaatctcctgcatgtctaaaccgcccgcacctaacccaacaccccctcggaatctcgattcgcgcaccttcattactataggggaccgaaactttgaagtggaggccgatgaccttgtcacgatctcagaactgggacgtggtgcgtacggcgttgtggagaaggtaagacacgctcagagcgggaccattatggccgtgaagaggatccgggcaacagtcaatagtcaggaacagaaacgcttgttaatggatctggacattaacatgagaactgtggattgtttctataccgttacattttacggagccctattcagggagggcgacgtgtggatctgcatggagctcatggatacctccctggacaagttttatcggaaagtccttgataagaatatgactataccagaagacatcctgggtgagattgctgtgtctatcgtacgcgcattggaacatctccacagcaaactgtccgttattcatcgagatgtgaagccctcaaacgtcctgatcaataaggaggggcacgtgaaaatgtgtgacttcggaataagtggctacctcgtggacagcgtcgccaagacaatggatgctggctgcaaaccttatatggccccagagagaattaacccggaattaaatcaaaaggggtacaacgttaaatctgacgtgtggtccctgggaatcaccatgattgagatggcgatccttaggtttccctatgaatcatggggtacgcctttccagcagttgaagcaggtagtggaggaaccaagcccccaactgcctgcagatcggtttagtccagagttcgtcgactttactgcccagtgtctacgtaaaaatcccgctgagcgcatgtcttacctcgaactgatggagcatccgttctttacccttcacaagacaaagaaaactgatatcgccgcattcgtgaaggaaattctgggcgaggactcctga

SEQ ID NO: 8988 - RNA, 1044 nt, synthetic construct
  misc_feature 1..1044: note = derived and/or modified sequence opt4 fromMKK3__Homo_sapiens__AAH32478
  source 1..1044: mol_type = other RNA
atggagagccccgccagcagccagcccgccagcatgccccagagcaagggcaagagcaagagaaagaaggacctgagaatcagctgcatgagcaagccccccgcccccaaccccaccccccccagaaacctggacagcagaaccttcatcaccatcggcgacagaaacttcgaggtggaggccgacgacctggtgaccatcagcgagctgggcagaggcgcctacggcgtggtggagaaggtgagacacgcccagagcggcaccatcatggccgtgaagagaatcagagccaccgtgaacagccaggagcagaagagactgctgatggacctggacatcaacatgagaaccgtggactgcttctacaccgtgaccttctacggcgccctgttcagagagggcgacgtgtggatctgcatggagctgatggacaccagcctggacaagttctacagaaaggtgctggacaagaacatgaccatccccgaggacatcctgggcgagatcgccgtgagcatcgtgagagccctggagcacctgcacagcaagctgagcgtgatccacagagacgtgaagcccagcaacgtgctgatcaacaaggagggccacgtgaagatgtgcgacttcggcatcagcggctacctggtggacagcgtggccaagaccatggacgccggctgcaagccctacatggcccccgagagaatcaaccccgagctgaaccagaagggctacaacgtgaagagcgacgtgtggagcctgggcatcaccatgatcgagatggccatcctgagattcccctacgagagctggggcacccccttccagcagctgaagcaggtggtggaggagcccagcccccagctgcccgccgacagattcagccccgagttcgtggacttcaccgcccagtgcctgagaaagaaccccgccgagagaatgagctacctggagctgatggagcaccccttcttcaccctgcacaagaccaagaagaccgacatcgccgccttcgtgaaggagatcctgggcgaggacagctga

SEQ ID NO: 8989 - RNA, 1044 nt, synthetic construct
  misc_feature 1..1044: note = derived and/or modified sequence opt5 fromMKK3__Homo_sapiens__AAH32478
  source 1..1044: mol_type = other RNA
atggagagccccgcctcctctcagcctgctagcatgccgcaatccaagggcaaatctaagagaaagaaggacctgcggatcagctgcatgtccaaaccccctgcccccaaccctacaccccctcgcaatctcgattctagaaccttcattacgatcggggaccggaactttgaagtggaggcggatgacctggtcaccattagcgaacttggacgcggcgcttacggggttgtggagaaggtgagacacgcccagtccggaacaatcatggccgtcaagcggattcgcgctaccgtgaatagccaggaacagaaaagactgctcatggatctggacatcaacatgcggacagttgattgtttctataccgtgacattttacggcgcccttttccgcgagggggacgtctggatctgcatggagctgatggatacctctctcgacaagttttatagaaaagtgctggataagaatatgacgattccggaagacatcctgggagagattgctgtttccatcgtgcgggccctcgaacatctgcacagcaaactttctgtcattcatcgcgatgtgaagccctccaacgtgctgatcaataaggagggccacgtcaaaatgtgtgacttcggcattagcgggtacctcgttgactctgtggcgaagaccatggatgccggatgcaaaccttatatggctcccgagagaatcaaccctgaactgaatcaaaagggctacaacgtgaaatccgacgtctggagccttgggatcacaatgattgagatggccatcctgcggtttccctatgaatcctggggaaccccgttccagcagctcaaacaggtggttgaggaaccttctccccaactgcctgctgatcgctttagccccgagttcgtggactttacagcccagtgtctgcggaaaaatcccgcggagagaatgtcctacctcgaactgatggagcatcctttctttacccttcacaagacgaagaaaacagatattgccgctttcgtcaaggaaatcctgggcgaggacagctga

SEQ ID NO: 8990 - protein, 399 aa, synthetic construct
  REGION 1..399: note = MKK4__Homo_sapiens__P45985
MAAPSPSGGGGSGGGSGSGTPGPVGSPAPGHPAVSSMQGKRKALKLNFANPPFKSTARFTLNPNPTGVQNPHIERLRTHSIESSGKLKISPEQHWDFTAEDLKDLGEIGRGAYGSVNKMVHKPSGQIMAVKRIRSTVDEKEQKQLLMDLDVVMRSSDCPYIVQFYGALFREGDCWICMELMSTSFDKFYKYVYSVLDDVIPEEILGKITLATVKALNHLKENLKIIHRDIKPSNILLDRSGNIKLCDFGISGQLVDSIAKTRDAGCRPYMAPERIDPSASRQGYDVRSDVWSLGITLYELATGRFPYPKWNSVFDQLTQVVKGDPPQLSNSEEREFSPSFINFVNLCLTKDESKRPKYKELLKHPFILMYEERAVEVACYVCKILDQMPATPSSPMYVD

SEQ ID NO: 8991 - RNA, 1200 nt, synthetic construct
  misc_feature 1..1200: note = MKK4__Homo_sapiens__AAC24130
  source 1..1200: mol_type = other RNA
atggcggctccgagcccgagcggcggcggcggctccgggggcggcagcggcagcggcacccccggccccgtagggtccccggcgccaggccacccggccgtcagcagcatgcagggtaaacgcaaagcactgaagttgaattttgcaaatccacctttcaaatctacagcaaggtttactctgaatcccaatcctacaggagttcaaaacccacacatagagagactgagaacacacagcattgagtcatcaggaaaactgaagatctcccctgaacaacactgggatttcactgcagaggacttgaaagaccttggagaaattggacgaggagcttatggttctgtcaacaaaatggtccacaaaccaagtgggcaaataatggcagttaaaagaattcggtcaacagtggatgaaaaagaacaaaaacaacttcttatggatttggatgtagtaatgcggagtagtgattgcccatacattgttcagttttatggtgcactcttcagagagggtgactgttggatctgtatggaactcatgtctacctcgtttgataagttttacaaatatgtatatagtgtattagatgatgttattccagaagaaattttaggcaaaatcactttagcaactgtgaaagcactaaaccacttaaaagaaaacttgaaaattattcacagagatatcaaaccttccaatattcttctggacagaagtggaaatattaagctctgtgacttcggcatcagtggacagcttgtggactctattgccaagacaagagatgctggctgtaggccatacatggcacctgaaagaatagacccaagcgcatcacgacaaggatatgatgtccgctctgatgtctggagtttggggatcacattgtatgagttggccacaggccgatttccttatccaaagtggaatagtgtatttgatcaactaacacaagtcgtgaaaggagatcctccgcagctgagtaattctgaggaaagggaattctccccgagtttcatcaactttgtcaacttgtgccttacgaaggatgaatccaaaaggccaaagtataaagagcttctgaaacatccctttattttgatgtatgaagaacgtgccgttgaggtcgcatgctatgtttgtaaaatcctggatcaaatgccagctactcccagctctcccatgtatgtcgattga

SEQ ID NO: 8992 - RNA, 1200 nt, synthetic construct
  misc_feature 1..1200: note = derived and/or modified sequence opt1 fromMKK4__Homo_sapiens__AAC24130
  source 1..1200: mol_type = other RNA
atggccgcccccagcccgtccggcgggggcgggagcggcgggggctccggcagcgggacccccggccccgtggggtcccccgcgccgggccaccccgccgtcagctccatgcaggggaagcgcaaggccctgaagctcaacttcgccaacccgcccttcaagagcaccgcccggttcacgctgaaccccaaccccaccggcgtgcagaacccccacatcgagcgcctgcggacccactccatcgagagctccggcaagctcaagatcagccccgagcagcactgggacttcaccgcggaggacctgaaggacctgggggagatcggccgcggggcctacggctccgtgaacaagatggtccacaagccgagcggccagatcatggccgtgaagcggatccgctccacggtggacgagaaggagcagaagcagctcctgatggacctggacgtcgtgatgcggagctccgactgcccctacatcgtgcagttctacggggccctcttccgcgagggcgactgctggatctgcatggagctgatgagcacctccttcgacaagttctacaagtacgtctacagcgtgctggacgacgtgatccccgaggagatcctcgggaagatcaccctggcgaccgtcaaggccctgaaccacctcaaggagaacctgaagatcatccaccgggacatcaagcccagcaacatcctgctcgaccgctccggcaacatcaagctgtgcgacttcgggatcagcggccagctggtggactccatcgccaagacgcgggacgccggctgccgcccgtacatggcccccgagcggatcgaccccagcgcgtcccgccaggggtacgacgtgcggagcgacgtctggtccctcggcatcaccctgtacgagctggccaccgggcgcttcccctacccgaagtggaacagcgtgttcgaccagctcacccaggtggtcaagggcgacccgccccagctgtccaacagcgaggagcgggagttctcccccagcttcatcaacttcgtgaacctgtgcctcacgaaggacgagtccaagcgccccaagtacaaggagctgctgaagcaccccttcatcctcatgtacgaggagcgggccgtggaggtcgcctgctacgtgtgcaagatcctggaccagatgcccgccacccccagctccccgatgtacgtggactga

SEQ ID NO: 8993 - RNA, 1200 nt, synthetic construct
  misc_feature 1..1200: note = derived and/or modified sequence opt2 fromMKK4__Homo_sapiens__AAC24130
  source 1..1200: mol_type = other RNA
atggccgccccctccccctccggcggcggcggctccggcggcggctccggctccggcacccccggccccgtcggctcccccgcccccggccaccccgccgtctcctccatgcagggcaagcgcaaggccctcaagctcaacttcgccaacccccccttcaagtccaccgcccgcttcaccctcaaccccaaccccaccggcgtccagaacccccacatcgagcgcctccgcacccactccatcgagtcctccggcaagctcaagatctcccccgagcagcactgggacttcaccgccgaggacctcaaggacctcggcgagatcggccgcggcgcctacggctccgtcaacaagatggtccacaagccctccggccagatcatggccgtcaagcgcatccgctccaccgtcgacgagaaggagcagaagcagctcctcatggacctcgacgtcgtcatgcgctcctccgactgcccctacatcgtccagttctacggcgccctcttccgcgagggcgactgctggatctgcatggagctcatgtccacctccttcgacaagttctacaagtacgtctactccgtcctcgacgacgtcatccccgaggagatcctcggcaagatcaccctcgccaccgtcaaggccctcaaccacctcaaggagaacctcaagatcatccaccgcgacatcaagccctccaacatcctcctcgaccgctccggcaacatcaagctctgcgacttcggcatctccggccagctcgtcgactccatcgccaagacccgcgacgccggctgccgcccctacatggcccccgagcgcatcgacccctccgcctcccgccagggctacgacgtccgctccgacgtctggtccctcggcatcaccctctacgagctcgccaccggccgcttcccctaccccaagtggaactccgtcttcgaccagctcacccaggtcgtcaagggcgaccccccccagctctccaactccgaggagcgcgagttctccccctccttcatcaacttcgtcaacctctgcctcaccaaggacgagtccaagcgccccaagtacaaggagctcctcaagcaccccttcatcctcatgtacgaggagcgcgccgtcgaggtcgcctgctacgtctgcaagatcctcgaccagatgcccgccaccccctcctcccccatgtacgtcgactga

SEQ ID NO: 8994 - RNA, 1200 nt, synthetic construct
  misc_feature 1..1200: note = derived and/or modified sequence opt3 fromMKK4__Homo_sapiens__AAC24130
  source 1..1200: mol_type = other RNA
atggccgctcccagcccttccggcgggggaggttctggcgggggatcaggcagtggtaccccagggccggtgggaagccccgcacctggccacccagccgtctcctctatgcagggcaagagaaaagcgctgaagctcaacttcgctaatcccccttttaaatcgacagccaggttcactcttaacccaaatcccacgggggttcaaaaccctcatatcgagcggctgcgcacccactcaattgaaagcagtggaaagttgaaaatatccccagagcagcattgggactttacagcagaagatttaaaggacctgggtgagatcggccgaggggcctacggatctgtgaataagatggtacacaaaccgagcggccagattatggctgtgaagcgtatcagatccactgtcgatgaaaaagagcagaagcaactactcatggacctggatgtggttatgaggtcaagtgactgcccctatattgtgcagttctacggtgcactttttcgggagggggattgttggatctgcatggaactgatgagcacctctttcgacaaattttataagtacgtctattccgtgttggatgacgtaatacctgaggaaatcctcggaaagattacactggccaccgttaaagctctgaaccatctcaaggagaatttaaaaatcattcaccgcgatatcaagccatcaaacatactgcttgacagaagcggcaatattaaattgtgtgatttcggcatcagtgggcagctggtggactctattgccaagactagggacgcgggatgccggccctacatggcacctgagcgcatcgatccatccgccagccgacagggttatgacgtcagatcggatgtgtggtctctaggcatcacactctacgaactggctaccgggaggtttccctacccgaaatggaactccgtgttcgaccaacttacgcaggtcgttaagggagatcctccccagctgtcaaatagtgaggaacgggagtttagcccatccttcattaactttgtgaatttgtgtctcactaaggacgaatctaaacgtcctaagtataaagagctgttaaagcaccccttcatactgatgtacgaggaacgcgccgtagaggtggcatgctatgtctgtaaaatcctcgatcagatgccagctacccccagctcacctatgtacgtggactga

SEQ ID NO: 8995 - RNA, 1200 nt, synthetic construct
  misc_feature 1..1200: note = derived and/or modified sequence opt4 fromMKK4__Homo_sapiens__AAC24130
  source 1..1200: mol_type = other RNA
atggccgcccccagccccagcggcggcggcggcagcggcggcggcagcggcagcggcacccccggccccgtgggcagccccgcccccggccaccccgccgtgagcagcatgcagggcaagagaaaggccctgaagctgaacttcgccaacccccccttcaagagcaccgccagattcaccctgaaccccaaccccaccggcgtgcagaacccccacatcgagagactgagaacccacagcatcgagagcagcggcaagctgaagatcagccccgagcagcactgggacttcaccgccgaggacctgaaggacctgggcgagatcggcagaggcgcctacggcagcgtgaacaagatggtgcacaagcccagcggccagatcatggccgtgaagagaatcagaagcaccgtggacgagaaggagcagaagcagctgctgatggacctggacgtggtgatgagaagcagcgactgcccctacatcgtgcagttctacggcgccctgttcagagagggcgactgctggatctgcatggagctgatgagcaccagcttcgacaagttctacaagtacgtgtacagcgtgctggacgacgtgatccccgaggagatcctgggcaagatcaccctggccaccgtgaaggccctgaaccacctgaaggagaacctgaagatcatccacagagacatcaagcccagcaacatcctgctggacagaagcggcaacatcaagctgtgcgacttcggcatcagcggccagctggtggacagcatcgccaagaccagagacgccggctgcagaccctacatggcccccgagagaatcgaccccagcgccagcagacagggctacgacgtgagaagcgacgtgtggagcctgggcatcaccctgtacgagctggccaccggcagattcccctaccccaagtggaacagcgtgttcgaccagctgacccaggtggtgaagggcgaccccccccagctgagcaacagcgaggagagagagttcagccccagcttcatcaacttcgtgaacctgtgcctgaccaaggacgagagcaagagacccaagtacaaggagctgctgaagcaccccttcatcctgatgtacgaggagagagccgtggaggtggcctgctacgtgtgcaagatcctggaccagatgcccgccacccccagcagccccatgtacgtggactga

SEQ ID NO: 8996 - RNA, 1200 nt, synthetic construct
  misc_feature 1..1200: note = derived and/or modified sequence opt5 fromMKK4__Homo_sapiens__AAC24130
  source 1..1200: mol_type = other RNA
atggccgctcccagcccttccggcgggggaggctctgggggaggcagcgggtccggaaccccgggccccgtgggctctcctgcccccgggcaccctgcggtcagctccatgcagggaaagagaaaagctctgaagctcaacttcgccaatcccccttttaaatctacagcccggttcacgctgaacccgaatcccaccggcgttcaaaaccctcatatcgagcgccttagaacacacagcattgaatccagcgggaagctgaaaatctctcccgagcagcattgggactttaccgctgaagatctcaaggacctgggagagattggccgcggggcctacggatccgtgaataagatggtgcacaaacctagcggccagatcatggctgtcaagcggattagatctacagtggatgaaaaagagcagaagcaacttctgatggacctcgatgttgtgatgcggtccagcgactgcccctatatcgtccagttctacggcgccctgtttcgcgagggggattgttggatctgcatggaactgatgtctacctccttcgacaaattttataagtacgtgtatagcgttctcgatgacgtgattccggaggaaatcctgggaaagattacacttgcgaccgtcaaagccctgaaccatctcaaggagaatctgaaaatcattcacagagatatcaagccttccaacattcttctggaccggtctggcaatatcaaactctgtgatttcgggatcagcggacagctggtggactccattgctaagacgcgcgacgccggctgcagaccctacatggctcctgagcggatcgatcccagcgcctctcgccaggggtatgacgtgagatccgatgtctggagcctgggaattaccctctacgaactggcgacaggccggtttccctaccctaaatggaactctgttttcgaccaacttacccaggtggtgaagggcgatccgccccagctgagcaattccgaggaacgcgagttttctcctagcttcatcaactttgtcaatctctgtctgacaaaggacgaatccaaaagacccaagtataaagagcttctgaagcaccctttcattctcatgtacgaggaacgggccgtggaggttgcttgctatgtgtgtaaaatcctggatcagatgcccgccaccccgagctctcctatgtacgtcgactga

SEQ ID NO: 8997 - protein, 334 aa, synthetic construct
  REGION 1..334: note = MKK6__Homo_sapiens__P52564
MSQSKGKKRNPGLKIPKEAFEQPQTSSTPPRDLDSKACISIGNQNFEVKADDLEPIMELGRGAYGVVEKMRHVPSGQIMAVKRIRATVNSQEQKRLLMDLDISMRTVDCPFTVTFYGALFREGDVWICMELMDTSLDKFYKQVIDKGQTIPEDILGKIAVSIVKALEHLHSKLSVIHRDVKPSNVLINALGQVKMCDFGISGYLVDSVAKTIDAGCKPYMAPERINPELNQKGYSVKSDIWSLGITMIELAILRFPYDSWGTPFQQLKQVVEEPSPQLPADKFSAEFVDFTSQCLKKNSKERPTYPELMQHPFFTLHESKGTDVASFVKLILGD

SEQ ID NO: 8998 - RNA, 1005 nt, synthetic construct
  misc_feature 1..1005: note = MKK6__Homo_sapiens__AAB05035
  source 1..1005: mol_type = other RNA
atgtctcagtcgaaaggcaagaagcgaaaccctggccttaaaattccaaaagaagcatttgaacaacctcagaccagttccacaccacctcgagatttagactccaaggcttgcatttctattggaaatcagaactttgaggtgaaggcagatgacctggagcctataatggaactgggacgaggtgcgtacggggtggtggagaagatgcggcacgtgcccagcgggcagatcatggcagtgaagcggatccgagccacagtaaatagccaggaacagaaacggctactgatggatttggatatttccatgaggacggtggactgtccattcactgtcaccttttatggcgcactgtttcgggagggtgatgtgtggatctgcatggagctcatggatacatcactagataaattctacaaacaagttattgataaaggccagacaattccagaggacatcttagggaaaatagcagtttctattgtaaaagcattagaacatttacatagtaagctgtctgtcattcacagagacgtcaagccttctaatgtactcatcaatgctctcggtcaagtgaagatgtgcgattttggaatcagtggctacttggtggactctgttgctaaaacaattgatgcaggttgcaaaccatacatggcccctgaaagaataaacccagagctcaaccagaagggatacagtgtgaagtctgacatttggagtctgggcatcacgatgattgagttggccatccttcgatttccctatgattcatggggaactccatttcagcagctcaaacaggtggtagaggagccatcgccacaactcccagcagacaagttctctgcagagtttgttgactttacctcacagtgcttaaagaagaattccaaagaacggcctacatacccagagctaatgcaacatccatttttcaccctacatgaatccaaaggaacagatgtggcatcttttgtaaaactgattcttggagactaa

SEQ ID NO: 8999 - RNA, 1005 nt, synthetic construct
  misc_feature 1..1005: note = derived and/or modified sequence opt1 fromMKK6__Homo_sapiens__AAB05035
  source 1..1005: mol_type = other RNA
atgagccagtccaagggcaagaagcgcaaccccgggctgaagatcccgaaggaggccttcgagcagccccagaccagctccaccccgccccgggacctcgacagcaaggcctgcatctccatcggcaaccagaacttcgaggtgaaggcggacgacctggagcccatcatggagctggggcgcggcgcctacggggtcgtggagaagatgcggcacgtgcccagcggccagatcatggccgtcaagcgcatccgggccacggtgaactcccaggagcagaagcgcctcctgatggacctggacatcagcatgcggaccgtggactgccccttcaccgtcaccttctacggcgccctcttccgcgagggggacgtgtggatctgcatggagctgatggacacgtccctggacaagttctacaagcaggtcatcgacaagggccagaccatccccgaggacatcctcgggaagatcgcggtgagcatcgtgaaggccctggagcacctccactccaagctgagcgtgatccaccgggacgtcaagccgtccaacgtgctgatcaacgccctgggccaggtgaagatgtgcgacttcgggatcagcggctacctcgtcgactccgtggccaagaccatcgacgcgggctgcaagccctacatggcccccgagcgcatcaaccccgagctgaaccagaaggggtacagcgtgaagtccgacatctggagcctgggcatcaccatgatcgagctcgccatcctgcggttcccgtacgactcctgggggacgcccttccagcagctgaagcaggtcgtggaggagcccagcccccagctcccggccgacaagttcagcgccgagttcgtggacttcacctcccagtgcctgaagaagaacagcaaggagcgccccacctaccccgagctgatgcagcaccccttcttcaccctccacgagtccaagggcacggacgtcgcgagcttcgtgaagctgatcctgggcgactga

SEQ ID NO: 9000 - RNA, 1005 nt, synthetic construct
  misc_feature 1..1005: note = derived and/or modified sequence opt2 fromMKK6__Homo_sapiens__AAB05035
  source 1..1005: mol_type = other RNA
atgtcccagtccaagggcaagaagcgcaaccccggcctcaagatccccaaggaggccttcgagcagccccagacctcctccacccccccccgcgacctcgactccaaggcctgcatctccatcggcaaccagaacttcgaggtcaaggccgacgacctcgagcccatcatggagctcggccgcggcgcctacggcgtcgtcgagaagatgcgccacgtcccctccggccagatcatggccgtcaagcgcatccgcgccaccgtcaactcccaggagcagaagcgcctcctcatggacctcgacatctccatgcgcaccgtcgactgccccttcaccgtcaccttctacggcgccctcttccgcgagggcgacgtctggatctgcatggagctcatggacacctccctcgacaagttctacaagcaggtcatcgacaagggccagaccatccccgaggacatcctcggcaagatcgccgtctccatcgtcaaggccctcgagcacctccactccaagctctccgtcatccaccgcgacgtcaagccctccaacgtcctcatcaacgccctcggccaggtcaagatgtgcgacttcggcatctccggctacctcgtcgactccgtcgccaagaccatcgacgccggctgcaagccctacatggcccccgagcgcatcaaccccgagctcaaccagaagggctactccgtcaagtccgacatctggtccctcggcatcaccatgatcgagctcgccatcctccgcttcccctacgactcctggggcacccccttccagcagctcaagcaggtcgtcgaggagccctccccccagctccccgccgacaagttctccgccgagttcgtcgacttcacctcccagtgcctcaagaagaactccaaggagcgccccacctaccccgagctcatgcagcaccccttcttcaccctccacgagtccaagggcaccgacgtcgcctccttcgtcaagctcatcctcggcgactga

SEQ ID NO: 9001 - RNA, 1005 nt, synthetic construct
  misc_feature 1..1005: note = derived and/or modified sequence opt3 fromMKK6__Homo_sapiens__AAB05035
  source 1..1005: mol_type = other RNA
atgagccagtccaagggcaaaaagagaaaccccgggctgaaaatccctaaggaggccttcgaacaaccacagacctcttcaacaccgcccagggacctcgatagtaaggcttgcattagcataggaaatcagaactttgaggtgaaggcagacgatcttgaacctatcatggagctgggtcggggcgcctacggggtcgttgaaaagatgcgccacgtgccatccggacagattatggcggtaaaacgaatccgtgctactgtcaattctcaagagcagaagagattgttaatggacctggatatttcgatgaggacggtggactgtcccttcaccgtgacattttatggcgccctattccgggagggtgatgtttggatctgcatggaactcatggacacttcactggataaattttacaaacaggtgatagacaaagggcagaccatccctgaggatattcttggaaagatcgcagtcagcattgtgaaggccctggaacatttgcacagtaaactctccgtaatccatcgcgacgttaagccatctaacgtgctgataaatgctctgggccaagtcaaaatgtgtgatttcggcattagcgggtatctcgtggactccgtggcaaagacaatcgacgccggatgcaaaccctacatggctcctgagagaattaacccagagttaaatcagaagggttattcagtcaaaagtgatatctggagcctgggcatcaccatgattgaacttgccatattgaggtttccgtacgactcttgggggactcccttccagcagctgaagcaagttgtggaggaaccttccccacagctacccgcggataagttttcagcagagttcgtagactttacaagccagtgtctcaaaaagaacagtaaagaacggcctacctatccagagctgatgcaacaccccttctttacgcttcatgagtctaagggaactgatgtggcctccttcgtcaaactgatcttgggcgactga

SEQ ID NO: 9002 - RNA, 1005 nt, synthetic construct
  misc_feature 1..1005: note = derived and/or modified sequence opt4 fromMKK6__Homo_sapiens__AAB05035
  source 1..1005: mol_type = other RNA
atgagccagagcaagggcaagaagagaaaccccggcctgaagatccccaaggaggccttcgagcagccccagaccagcagcaccccccccagagacctggacagcaaggcctgcatcagcatcggcaaccagaacttcgaggtgaaggccgacgacctggagcccatcatggagctgggcagaggcgcctacggcgtggtggagaagatgagacacgtgcccagcggccagatcatggccgtgaagagaatcagagccaccgtgaacagccaggagcagaagagactgctgatggacctggacatcagcatgagaaccgtggactgccccttcaccgtgaccttctacggcgccctgttcagagagggcgacgtgtggatctgcatggagctgatggacaccagcctggacaagttctacaagcaggtgatcgacaagggccagaccatccccgaggacatcctgggcaagatcgccgtgagcatcgtgaaggccctggagcacctgcacagcaagctgagcgtgatccacagagacgtgaagcccagcaacgtgctgatcaacgccctgggccaggtgaagatgtgcgacttcggcatcagcggctacctggtggacagcgtggccaagaccatcgacgccggctgcaagccctacatggcccccgagagaatcaaccccgagctgaaccagaagggctacagcgtgaagagcgacatctggagcctgggcatcaccatgatcgagctggccatcctgagattcccctacgacagctggggcacccccttccagcagctgaagcaggtggtggaggagcccagcccccagctgcccgccgacaagttcagcgccgagttcgtggacttcaccagccagtgcctgaagaagaacagcaaggagagacccacctaccccgagctgatgcagcaccccttcttcaccctgcacgagagcaagggcaccgacgtggccagcttcgtgaagctgatcctgggcgactga

SEQ ID NO: 9003 - RNA, 1005 nt, synthetic construct
  misc_feature 1..1005: note = derived and/or modified sequence opt5 fromMKK6__Homo_sapiens__AAB05035
  source 1..1005: mol_type = other RNA
atgagccagtccaagggcaaaaagagaaaccccgggctgaaaatccctaaggaggccttcgaacaaccgcagacctctagcacaccccctcgggacctcgattccaaggcttgcatttctatcggaaatcagaactttgaggtgaaagccgacgatctggaacccattatggagcttggccgcggggcgtacggagtcgttgaaaagatgagacacgtgcctagcggccagatcatggctgtgaaacggattcgcgccacggtcaattcccaagagcagaagagactgctcatggacctggatatctctatgcggaccgtggactgtcccttcacagttaccttttatggggcccttttccgcgagggagatgtgtggatctgcatggaactgatggacacaagcctcgataaattttacaagcaggtcattgacaaaggccagaccatccctgaggatattctgggcaagatcgctgtgtccattgttaaggccctggaacatctccacagcaaactgtctgtgatccatagagacgtcaagccgtccaacgtgcttattaatgctctggggcaagtgaaaatgtgtgatttcggaatcagcggctatctcgtcgactctgttgccaagacaatcgacgcggggtgcaaaccctacatggcccctgagcggattaaccccgagctgaatcagaagggatattccgtgaaaagcgatatctggtctcttggcattaccatgatcgaactggctattctccgctttccttacgactcctgggggacgcccttccagcagctgaagcaagtggtcgaggaaccgagccctcagctgcccgccgataagttttccgctgagttcgtggactttacctctcagtgtctcaaaaagaacagcaaagaaagacctacatatcccgagctgatgcaacaccccttctttacccttcatgagtccaagggaacagatgttgccagcttcgtgaaactgatcctcggcgactga

SEQ ID NO: 9004 - protein, 419 aa, synthetic construct
  REGION 1..419: note = MKK7__Homo_sapiens__O14733
MAASSLEQKLSRLEAKLKQENREARRRIDLNLDISPQRPRPTLQLPLANDGGSRSPSSESSPQHPTPPARPRHMLGLPSTLFTPRSMESIEIDQKLQEIMKQTGYLTIGGQRYQAEINDLENLGEMGSGTCGQVWKMRFRKTGHVIAVKQMRRSGNKEENKRILMDLDVVLKSHDCPYIVQCFGTFITNTDVFIAMELMGTCAEKLKKRMQGPIPERILGKMTVAIVKALYYLKEKHGVIHRDVKPSNILLDERGQIKLCDFGISGRLVDSKAKTRSAGCAAYMAPERIDPPDPTKPDYDIRADVWSLGISLVELATGQFPYKNCKTDFEVLTKVLQEEPPLLPGHMGFSGDFQSFVKDCLTKDHRKRPKYNKLLEHSFIKRYETLEVDVASWFKDVMAKTESPRTSGVLSQPHLPFFR

SEQ ID NO: 9005 - RNA, 1260 nt, synthetic construct
  misc_feature 1..1260: note = MKK7__Homo_sapiens__AAC26142
  source 1..1260: mol_type = other RNA
atggcggcgtcctccctggaacagaagctgtcccgcctggaagcaaagctgaagcaggagaaccgggaggcccggcggaggatcgacctcaacctggatatcagcccccagcggcccaggcccaccctgcagctcccgctggccaacgatgggggcagccgctcgccatcctcagagagctccccgcagcaccccacgccccccgcccggccccgccacatgctggggctcccgtcaaccctgttcacaccccgcagcatggagagcattgagattgaccagaagctgcaggagatcatgaagcagacgggctacctgaccatcgggggccagcgctaccaggcagaaatcaacgacctggagaacttgggcgagatgggcagcggcacctgcggccaggtgtggaagatgcgcttccggaagaccggccacgtcattgccgttaagcaaatgcggcgctccgggaacaaggaggagaacaagcgcatcctcatggacctggatgtggtgctgaagagccacgactgcccctacatcgtgcagtgctttgggacgttcatcaccaacacggacgtcttcatcgccatggagctcatgggcacctgcgctgagaagctcaagaagcggatgcagggccccatccccgagcgcattctgggcaagatgacagtggcgattgtgaaggcgctgtactacctgaaggagaagcacggtgtcatccaccgcgacgtcaagccctccaacatcctgctggacgagcggggccagatcaagctctgcgacttcggcatcagcggccgcctggtggactccaaagccaagacgcggagcgccggctgtgccgcctacatggcacccgagcgcattgaccccccagaccccaccaagccggactatgacatccgggccgacgtatggagcctgggcatctcgttggtggagctggcaacaggacagtttccctacaagaactgcaagacggactttgaggtcctcaccaaagtcctacaggaagagcccccgcttctgcccggacacatgggcttctcgggggacttccagtccttcgtcaaagactgccttactaaagatcacaggaagagaccaaagtataataagctacttgaacacagcttcatcaagcgctacgagacgctggaggtggacgtggcgtcctggttcaaggatgtcatggcgaagactgagtcaccgcggactagcggcgtcctgagccagccccacctgcccttcttcaggtag

SEQ ID NO: 9006 - RNA, 1260 nt, synthetic construct
  misc_feature 1..1260: note = derived and/or modified sequence opt1 fromMKK7__Homo_sapiens__AAC26142
  source 1..1260: mol_type = other RNA
atggccgccagctccctggagcagaagctcagccgcctggaggcgaagctgaagcaggagaaccgggaggcccgccggcgcatcgacctcaacctggacatcagcccccagcggccgcgccccaccctgcagctccccctggccaacgacggcgggtcccggtcccccagctccgagagctccccgcagcaccccaccccgcccgcccgcccccggcacatgctgggcctccccagcacgctgttcacgccccgctccatggagagcatcgagatcgaccagaagctgcaggagatcatgaagcagaccgggtacctcaccatcggcgggcagcggtaccaggccgagatcaacgacctggagaacctgggcgagatgggctccgggacctgcggccaggtgtggaagatgcgcttccggaagaccgggcacgtcatcgcggtgaagcagatgcgccggagcggcaacaaggaggagaacaagcgcatcctcatggacctggacgtggtcctgaagtcccacgactgcccctacatcgtgcagtgcttcgggaccttcatcaccaacacggacgtgttcatcgccatggagctcatggggacctgcgccgagaagctgaagaagcggatgcagggcccgatccccgagcgcatcctgggcaagatgaccgtcgccatcgtgaaggcgctctactacctgaaggagaagcacggcgtgatccaccgggacgtcaagcccagcaacatcctgctcgacgagcgcgggcagatcaagctgtgcgacttcggcatctccggccggctggtggacagcaaggccaagacccgctccgccgggtgcgccgcctacatggcgcccgagcgcatcgacccgcccgaccccacgaagcccgactacgacatccgggccgacgtgtggagcctcggcatcagcctggtcgagctggccaccgggcagttcccgtacaagaactgcaagaccgacttcgaggtgctcaccaaggtgctgcaggaggagccgcccctgctccccggccacatggggttctccggcgacttccagagcttcgtcaaggactgcctgacgaaggaccaccgcaagcggcccaagtacaacaagctgctcgagcactccttcatcaagcgctacgagaccctggaggtggacgtggccagctggttcaaggacgtcatggccaagaccgagagcccccggacctccggcgtgctgtcccagccccacctccccttcttccgctga

SEQ ID NO: 9007 - RNA, 1260 nt, synthetic construct
  misc_feature 1..1260: note = derived and/or modified sequence opt2 fromMKK7__Homo_sapiens__AAC26142
  source 1..1260: mol_type = other RNA
atggccgcctcctccctcgagcagaagctctcccgcctcgaggccaagctcaagcaggagaaccgcgaggcccgccgccgcatcgacctcaacctcgacatctccccccagcgcccccgccccaccctccagctccccctcgccaacgacggcggctcccgctccccctcctccgagtcctccccccagcaccccaccccccccgcccgcccccgccacatgctcggcctcccctccaccctcttcaccccccgctccatggagtccatcgagatcgaccagaagctccaggagatcatgaagcagaccggctacctcaccatcggcggccagcgctaccaggccgagatcaacgacctcgagaacctcggcgagatgggctccggcacctgcggccaggtctggaagatgcgcttccgcaagaccggccacgtcatcgccgtcaagcagatgcgccgctccggcaacaaggaggagaacaagcgcatcctcatggacctcgacgtcgtcctcaagtcccacgactgcccctacatcgtccagtgcttcggcaccttcatcaccaacaccgacgtcttcatcgccatggagctcatgggcacctgcgccgagaagctcaagaagcgcatgcagggccccatccccgagcgcatcctcggcaagatgaccgtcgccatcgtcaaggccctctactacctcaaggagaagcacggcgtcatccaccgcgacgtcaagccctccaacatcctcctcgacgagcgcggccagatcaagctctgcgacttcggcatctccggccgcctcgtcgactccaaggccaagacccgctccgccggctgcgccgcctacatggcccccgagcgcatcgacccccccgaccccaccaagcccgactacgacatccgcgccgacgtctggtccctcggcatctccctcgtcgagctcgccaccggccagttcccctacaagaactgcaagaccgacttcgaggtcctcaccaaggtcctccaggaggagccccccctcctccccggccacatgggcttctccggcgacttccagtccttcgtcaaggactgcctcaccaaggaccaccgcaagcgccccaagtacaacaagctcctcgagcactccttcatcaagcgctacgagaccctcgaggtcgacgtcgcctcctggttcaaggacgtcatggccaagaccgagtccccccgcacctccggcgtcctctcccagccccacctccccttcttccgctga

SEQ ID NO: 9008 - RNA, 1260 nt, synthetic construct
  misc_feature 1..1260: note = derived and/or modified sequence opt3 fromMKK7__Homo_sapiens__AAC26142
  source 1..1260: mol_type = other RNA
atggccgctagctccctggagcagaagctctctagacttgaagcaaaactgaagcaagagaacagggaagcccggcgccgaatcgacttgaatttagatatttcaccccagcgtcctagaccaaccctgcagctaccgctcgcgaacgacggcgggagtaggagcccctcctctgagtcgtcacctcagcacccaacaccccctgctcggccacgccatatgctgggacttcccagcactctgttcacgcctagaagtatggaatccatagagatcgatcaaaaattgcaggagattatgaagcagaccggttacctcacaatcggcgggcagaggtatcaagccgaaattaatgacctggagaacctgggagaaatgggctctggtacttgcggacaggtgtggaaaatgcggtttcgcaagaccgggcacgtcatcgcagttaagcagatgcgaagaagcggcaataaagaggagaacaagaggatactcatggatttagacgtggtactgaaatcccatgattgtccatacatcgtgcagtgcttcggcacatttattaccaatactgacgtcttcatcgccatggaacttatggggacatgtgctgagaagttgaaaaagcggatgcaaggaccgattcccgaacgtatcctgggtaagatgaccgtggcaatagttaaagccctatattacctcaaggagaaacacggcgtgattcatcgcgatgtcaagccttcaaacatcctgcttgacgaaagagggcagattaaactgtgcgattttggaatcagtggcaggttggtggacagcaaggctaaaacgcggtctgccggttgtgcggcatatatggccccagagcgaatcgatccccctgacccaactaagcccgactacgatattcgcgctgacgtatggtccctcgggatatcactggttgagttagccaccggacagttcccgtataagaattgcaaaacagattttgaagtgctgactaaggtcctccaagaggaacctccccttctgccaggccacatgggcttcagcggggactttcagagtttcgtgaaagattgtttgaccaaggaccacagaaaaaggcctaagtacaacaagctactggagcattcttttatcaaacggtacgaaacactcgaggtggatgtcgcatcctggttcaaggacgttatggctaaaaccgagagcccccgcacgtcgggagtgctgtctcagccacaccttccctttttcagatga

SEQ ID NO: 9009 - RNA, 1260 nt, synthetic construct
  misc_feature 1..1260: note = derived and/or modified sequence opt4 fromMKK7__Homo_sapiens__AAC26142
  source 1..1260: mol_type = other RNA
atggccgccagcagcctggagcagaagctgagcagactggaggccaagctgaagcaggagaacagagaggccagaagaagaatcgacctgaacctggacatcagcccccagagacccagacccaccctgcagctgcccctggccaacgacggcggcagcagaagccccagcagcgagagcagcccccagcaccccaccccccccgccagacccagacacatgctgggcctgcccagcaccctgttcacccccagaagcatggagagcatcgagatcgaccagaagctgcaggagatcatgaagcagaccggctacctgaccatcggcggccagagataccaggccgagatcaacgacctggagaacctgggcgagatgggcagcggcacctgcggccaggtgtggaagatgagattcagaaagaccggccacgtgatcgccgtgaagcagatgagaagaagcggcaacaaggaggagaacaagagaatcctgatggacctggacgtggtgctgaagagccacgactgcccctacatcgtgcagtgcttcggcaccttcatcaccaacaccgacgtgttcatcgccatggagctgatgggcacctgcgccgagaagctgaagaagagaatgcagggccccatccccgagagaatcctgggcaagatgaccgtggccatcgtgaaggccctgtactacctgaaggagaagcacggcgtgatccacagagacgtgaagcccagcaacatcctgctggacgagagaggccagatcaagctgtgcgacttcggcatcagcggcagactggtggacagcaaggccaagaccagaagcgccggctgcgccgcctacatggcccccgagagaatcgacccccccgaccccaccaagcccgactacgacatcagagccgacgtgtggagcctgggcatcagcctggtggagctggccaccggccagttcccctacaagaactgcaagaccgacttcgaggtgctgaccaaggtgctgcaggaggagccccccctgctgcccggccacatgggcttcagcggcgacttccagagcttcgtgaaggactgcctgaccaaggaccacagaaagagacccaagtacaacaagctgctggagcacagcttcatcaagagatacgagaccctggaggtggacgtggccagctggttcaaggacgtgatggccaagaccgagagccccagaaccagcggcgtgctgagccagccccacctgcccttcttcagatga

SEQ ID NO: 9010 - RNA, 1260 nt, synthetic construct
  misc_feature 1..1260: note = derived and/or modified sequence opt5 fromMKK7__Homo_sapiens__AAC26142
  source 1..1260: mol_type = other RNA
atggccgctagctccctggagcagaagctctctagactggaagccaaacttaagcaagagaaccgggaagcgcgcagacggatcgacctgaatctcgatattagcccccagcgccctagaccgaccctgcagcttcccctggctaacgacggcgggtcccggtctcctagctccgagtctagcccccagcaccctacaccccctgcccgcccgagacatatgctcggactgccctccacgctgttcacccctcggagcatggaatctatcgagattgatcaaaaactccaggagatcatgaagcagacaggctacctgaccattgggggacagcgctatcaagccgaaatcaatgaccttgagaacctgggcgaaatggggtccggaacatgcggccaggtgtggaaaatgagatttcggaagaccggccacgtcatcgctgttaagcagatgcgcagaagcgggaataaagaggagaacaagcggattctcatggatctggacgtggtgcttaaatctcatgattgtccctacatcgtccagtgcttcggaacatttattaccaatacggacgtgttcatcgccatggaactgatgggcacctgtgctgagaagctcaaaaagcgcatgcaagggcctattcccgaaagaatcctgggaaagatgacagttgccattgtgaaagcgctgtattacctcaaggagaaacacggcgtcatccatcgggatgtgaagccgtccaacatcctgcttgacgaaagagggcagattaaactgtgcgattttggaatcagcggccgcctcgttgactctaaggccaaaacccggtccgctggctgtgccgcttatatggcccctgagagaattgatccccctgaccccacaaagcccgactacgatatccgcgcggacgtgtggagcctggggatttcccttgtcgagctggccaccggacagttcccttataagaattgcaaaacggattttgaagtgctcacaaaggtgctgcaagaggaaccgcccctgctccctggccacatggggttctctggagactttcagagcttcgtcaaagattgtctgaccaaggaccaccggaaaagacccaagtacaacaaacttctggagcattcctttatcaagcgctacgaaacactcgaggttgatgtggctagctggttcaaggacgtgatggccaaaaccgagtctcctcggacctccggcgtcctgagccagccccaccttccgtttttcagatga

SEQ ID NO: 9011 - protein, 181 aa, synthetic construct
  REGION 1..181: note = MSTP104__Homo_sapiens__Q7Z4D5
MKDGQKILFHGEGDQEPELEPGDVIIVLDQKDHSVFQRRGHDLIMKMKIQLSEALCGFKKTIKTLDNRILVITSKAGEVIKHGDLRCVRDEGMPIYKAPLEKGILIIQFLVIFPEKHWLSLEKLPQLEALLPPRQKVRITDDMDQVELKEFCPNEQNWRQHREAYEEDEDGPQAGVQCQTA

SEQ ID NO: 9012 - RNA, 546 nt, synthetic construct
  misc_feature 1..546: note = MSTP104__Homo_sapiens__AAQ13629
  source 1..546: mol_type = other RNA
atgaaagatgggcaaaagatactatttcatggagaaggagatcaggagcctgagctggagcctggtgatgtcataattgtgcttgatcagaaggatcatagtgtctttcagagacgaggccatgacttgatcatgaaaatgaaaattcagctttctgaagctctttgtggcttcaagaagacgataaaaacattggacaatcgaattcttgttattacatccaaagcaggtgaggtgataaagcacggggacctgagatgcgtgcgcgatgaaggaatgcccatctacaaagcacccctggaaaaagggattctgatcatacagtttttagtaatctttcctgaaaaacactggctttctctggaaaagcttcctcagctggaagctttactccctcctcgacagaaagtgaggattacagatgacatggatcaggtggagctgaaggagttttgtcccaatgagcagaactggcgtcagcacagggaggcctacgaggaggacgaagacgggccccaggctggagtgcagtgccagacggcatga

SEQ ID NO: 9013 - RNA, 546 nt, synthetic construct
  misc_feature 1..546: note = derived and/or modified sequence opt1 fromMSTP104__Homo_sapiens__AAQ13629
  source 1..546: mol_type = other RNA
atgaaggacggccagaagatcctgttccacggggagggcgaccaggagcccgagctcgagccgggggacgtgatcatcgtcctggaccagaaggaccacagcgtgttccagcgccggggccacgacctgatcatgaagatgaagatccagctctccgaggccctgtgcgggttcaagaagaccatcaagaccctggacaaccgcatcctcgtgatcacgagcaaggccggcgaggtcatcaagcacggcgacctgcggtgcgtgcgcgacgaggggatgcccatctacaaggcgcccctggagaagggcatcctcatcatccagttcctggtgatcttccccgagaagcactggctgtccctcgagaagctgccgcagctggaggccctcctgccgccccggcagaaggtccgcatcaccgacgacatggaccaggtggagctgaaggagttctgccccaacgagcagaactggcggcagcaccgcgaggcctacgaggaggacgaggacgggccccaggccggcgtgcagtgccagaccgcctga

SEQ ID NO: 9014 - RNA, 546 nt, synthetic construct
  misc_feature 1..546: note = derived and/or modified sequence opt2 fromMSTP104__Homo_sapiens__AAQ13629
  source 1..546: mol_type = other RNA
atgaaggacggccagaagatcctcttccacggcgagggcgaccaggagcccgagctcgagcccggcgacgtcatcatcgtcctcgaccagaaggaccactccgtcttccagcgccgcggccacgacctcatcatgaagatgaagatccagctctccgaggccctctgcggcttcaagaagaccatcaagaccctcgacaaccgcatcctcgtcatcacctccaaggccggcgaggtcatcaagcacggcgacctccgctgcgtccgcgacgagggcatgcccatctacaaggcccccctcgagaagggcatcctcatcatccagttcctcgtcatcttccccgagaagcactggctctccctcgagaagctcccccagctcgaggccctcctccccccccgccagaaggtccgcatcaccgacgacatggaccaggtcgagctcaaggagttctgccccaacgagcagaactggcgccagcaccgcgaggcctacgaggaggacgaggacggcccccaggccggcgtccagtgccagaccgcctga

SEQ ID NO: 9015 - RNA, 546 nt, synthetic construct
  misc_feature 1..546: note = derived and/or modified sequence opt3 fromMSTP104__Homo_sapiens__AAQ13629
  source 1..546: mol_type = other RNA
atgaaggacggccagaaaatcctgttccacggggagggagatcaagaacccgagctcgaacctggtgacgtgattatagtccttgatcagaaggaccatagcgtttttcagagaaggggccacgatctgatcatgaaaatgaagattcagttgtccgaggccttatgcgggttcaaaaagaccatcaagacactggacaaccggattctagtgatcacttctaaagctggagaagtaataaagcatggcgatctccgctgtgtgcgagacgagggtatgccaatctacaaagcaccgctggagaaggggattcttatcattcaatttctggtcatcttccccgaaaaacactggttgtcactcgagaagctgcctcagctggaagccctcttaccaccccgtcagaaggtgagaataacggatgacatggatcaggttgagctgaaagagttttgccctaatgaacaaaactggaggcagcatcgggaggcgtatgaagaggacgaagatggaccacaggctggcgtgcagtgtcaaaccgcctga

SEQ ID NO: 9016 - RNA, 546 nt, synthetic construct
  misc_feature 1..546: note = derived and/or modified sequence opt4 fromMSTP104__Homo_sapiens__AAQ13629
  source 1..546: mol_type = other RNA
atgaaggacggccagaagatcctgttccacggcgagggcgaccaggagcccgagctggagcccggcgacgtgatcatcgtgctggaccagaaggaccacagcgtgttccagagaagaggccacgacctgatcatgaagatgaagatccagctgagcgaggccctgtgcggcttcaagaagaccatcaagaccctggacaacagaatcctggtgatcaccagcaaggccggcgaggtgatcaagcacggcgacctgagatgcgtgagagacgagggcatgcccatctacaaggcccccctggagaagggcatcctgatcatccagttcctggtgatcttccccgagaagcactggctgagcctggagaagctgccccagctggaggccctgctgccccccagacagaaggtgagaatcaccgacgacatggaccaggtggagctgaaggagttctgccccaacgagcagaactggagacagcacagagaggcctacgaggaggacgaggacggcccccaggccggcgtgcagtgccagaccgcctga

SEQ ID NO: 9017 - RNA, 546 nt, synthetic construct
  misc_feature 1..546: note = derived and/or modified sequence opt5 fromMSTP104__Homo_sapiens__AAQ13629
  source 1..546: mol_type = other RNA
atgaaggacggccagaaaatcctgttccacggggagggagatcaagaacccgagctcgaacctggcgacgtgattatcgtcctggatcagaaggaccatagcgtttttcagagacgggggcacgatcttattatgaaaatgaagatccagctgtccgaggccctctgcggattcaaaaagaccattaagacactggacaaccgcatccttgtgatcacgtctaaagctggcgaagtgattaagcatggggatctgagatgtgtccgggacgagggaatgccgatctacaaagcgcccctcgagaagggcattctgatcattcaatttctggtgatcttccctgaaaaacactggctcagcctggagaaacttccccagctggaagccctcctgcctccccgccagaaggttagaattaccgatgacatggatcaggtggagcttaaggagttttgccctaatgaacaaaactggcggcagcatcgcgaggcttatgaagaggacgaagatggcccgcaggccggggtccagtgtcaaacagcctga

SEQ ID NO: 9018 - protein, 296 aa, synthetic construct
  REGION 1..296: note = MyD88__Homo_sapiens__Q99836
MAAGGPGAGSAAPVSSTSSLPLAALNMRVRRRLSLFLNVRTQVAADWTALAEEMDFEYLEIRQLETQADPTGRLLDAWQGRPGASVGRLLELLTKLGRDDVLLELGPSIEEDCQKYILKQQQEEAEKPLQVAAVDSSVPRTAELAGITTLDDPLGHMPERFDAFICYCPSDIQFVQEMIRQLEQTNYRLKLCVSDRDVLPGTCVWSIASELIEKRCRRMVVVVSDDYLQSKECDFQTKFALSLSPGAHQKRLIPIKYKAMKKEFPSILRFITVCDYTNPCTKSWFWTRLAKALSLP

SEQ ID NO: 9019 - RNA, 891 nt, synthetic construct
  misc_feature 1..891: note = MyD88__Homo_sapiens__AAC50954
  source 1..891: mol_type = other RNA
atggctgcaggaggtcccggcgcggggtctgcggccccggtctcctccacatcctcccttcccctggctgctctcaacatgcgagtgcggcgccgcctgtctctgttcttgaacgtgcggacacaggtggcggccgactggaccgcgctggcggaggagatggactttgagtacttggagatccggcaactggagacacaagcggaccccactggcaggctgctggacgcctggcagggacgccctggcgcctctgtaggccgactgctcgagctgcttaccaagctgggccgcgacgacgtgctgctggagctgggacccagcattgaggaggattgccaaaagtatatcttgaagcagcagcaggaggaggctgagaagcctttacaggtggccgctgtagacagcagtgtcccacggacagcagagctggcgggcatcaccacacttgatgaccccctggggcatatgcctgagcgtttcgatgccttcatctgctattgccccagcgacatccagtttgtgcaggagatgatccggcaactggaacagacaaactatcgactgaagttgtgtgtgtctgaccgcgatgtcctgcctggcacctgtgtctggtctattgctagtgagctcatcgaaaagaggtgccgccggatggtggtggttgtctctgatgattacctgcagagcaaggaatgtgacttccagaccaaatttgcactcagcctctctccaggtgcccatcagaagcgactgatccccatcaagtacaaggcaatgaagaaagagttccccagcatcctgaggttcatcactgtctgcgactacaccaacccctgcaccaaatcttggttctggactcgccttgccaaggccttgtccctgccctga

SEQ ID NO: 9020 - RNA, 891 nt, synthetic construct
  misc_feature 1..891: note = derived and/or modified sequence opt1 fromMyD88__Homo_sapiens__AAC50954
  source 1..891: mol_type = other RNA
atggccgccggcgggcccggcgcggggagcgccgccccggtgtccagcacctccagcctgcccctcgccgccctgaacatgcgcgtccggcgccggctgtccctcttcctgaacgtgcgcacccaggtggcggccgactggacggccctggccgaggagatggacttcgagtacctcgagatccggcagctggagacccaggcggaccccaccggccgcctgctcgacgcctggcaggggcggcccggcgccagcgtcggccgcctgctggagctcctgaccaagctggggcgggacgacgtgctcctggagctgggcccgtccatcgaggaggactgccagaagtacatcctcaagcagcagcaggaggaggccgagaagcccctccaggtggccgcggtcgacagctccgtgccccgcacggccgagctggccgggatcaccaccctggacgaccccctgggccacatgccggagcggttcgacgccttcatctgctactgccccagcgacatccagttcgtgcaggagatgatccgccagctggagcagaccaactaccggctcaagctgtgcgtctccgaccgcgacgtgctgcccgggacgtgcgtgtggagcatcgcctccgagctcatcgagaagcggtgccgccggatggtcgtggtggtcagcgacgactacctgcagtccaaggagtgcgacttccagaccaagttcgcgctgagcctctcccccggcgcccaccagaagcgcctgatcccgatcaagtacaaggccatgaagaaggagttccccagcatcctgcggttcatcaccgtgtgcgactacaccaacccctgcacgaagtcctggttctggacccgcctcgccaaggccctgagcctgccctga

SEQ ID NO: 9021 - RNA, 891 nt, synthetic construct
  misc_feature 1..891: note = derived and/or modified sequence opt2 fromMyD88__Homo_sapiens__AAC50954
  source 1..891: mol_type = other RNA
atggccgccggcggccccggcgccggctccgccgcccccgtctcctccacctcctccctccccctcgccgccctcaacatgcgcgtccgccgccgcctctccctcttcctcaacgtccgcacccaggtcgccgccgactggaccgccctcgccgaggagatggacttcgagtacctcgagatccgccagctcgagacccaggccgaccccaccggccgcctcctcgacgcctggcagggccgccccggcgcctccgtcggccgcctcctcgagctcctcaccaagctcggccgcgacgacgtcctcctcgagctcggcccctccatcgaggaggactgccagaagtacatcctcaagcagcagcaggaggaggccgagaagcccctccaggtcgccgccgtcgactcctccgtcccccgcaccgccgagctcgccggcatcaccaccctcgacgaccccctcggccacatgcccgagcgcttcgacgccttcatctgctactgcccctccgacatccagttcgtccaggagatgatccgccagctcgagcagaccaactaccgcctcaagctctgcgtctccgaccgcgacgtcctccccggcacctgcgtctggtccatcgcctccgagctcatcgagaagcgctgccgccgcatggtcgtcgtcgtctccgacgactacctccagtccaaggagtgcgacttccagaccaagttcgccctctccctctcccccggcgcccaccagaagcgcctcatccccatcaagtacaaggccatgaagaaggagttcccctccatcctccgcttcatcaccgtctgcgactacaccaacccctgcaccaagtcctggttctggacccgcctcgccaaggccctctccctcccctga

SEQ ID NO: 9022 - RNA, 891 nt, synthetic construct
  misc_feature 1..891: note = derived and/or modified sequence opt3 fromMyD88__Homo_sapiens__AAC50954
  source 1..891: mol_type = other RNA
atggccgctggcgggcccggagcaggtagcgccgcgcctgtgtcctctacctcaagtctgccactcgctgcccttaacatgagagtcaggcggcgcctgagcttgttcttaaatgttcgaacacaggtggcagccgactggactgctctggcagaggaaatggattttgagtacctagaaatccgtcaactcgagacgcaggccgacccgaccggcagactgcttgatgcttggcaggggaggcccggagcctccgtaggccggctgttggaactcctgacaaagctgggtcgcgacgatgtgctcttagagctggggccttctattgaggaagactgccagaaatatatacttaagcaacagcaggaggaagcggagaaaccattgcaggtcgcagccgtggattcgtcagttcccagaactgctgagctggccggaatcaccacactagacgatcctctcggccacatgccagaaaggttcgacgcatttatttgttactgccccagcgatatccaattcgtgcaggagatgattcggcagctggaacagaccaactatcgccttaagctgtgtgtcagtgaccgagatgtgttgcctggcacttgcgtatggtccatcgcttctgagctcatagagaaaagatgtaggcggatggttgtggtcgtgagcgacgactacctgcaatccaaggaatgcgattttcagacaaagttcgccttatcactgagtccaggggcgcatcagaaacgtctcatcccgattaagtataaagccatgaagaaagagtttcccagcatccttcgcttcattaccgtgtgtgactacacgaatccttgcactaagtcttggttttggaccagactggcaaaggctttgtccctaccatga

SEQ ID NO: 9023 - RNA, 891 nt, synthetic construct
  misc_feature 1..891: note = derived and/or modified sequence opt4 fromMyD88__Homo_sapiens__AAC50954
  source 1..891: mol_type = other RNA
atggccgccggcggccccggcgccggcagcgccgcccccgtgagcagcaccagcagcctgcccctggccgccctgaacatgagagtgagaagaagactgagcctgttcctgaacgtgagaacccaggtggccgccgactggaccgccctggccgaggagatggacttcgagtacctggagatcagacagctggagacccaggccgaccccaccggcagactgctggacgcctggcagggcagacccggcgccagcgtgggcagactgctggagctgctgaccaagctgggcagagacgacgtgctgctggagctgggccccagcatcgaggaggactgccagaagtacatcctgaagcagcagcaggaggaggccgagaagcccctgcaggtggccgccgtggacagcagcgtgcccagaaccgccgagctggccggcatcaccaccctggacgaccccctgggccacatgcccgagagattcgacgccttcatctgctactgccccagcgacatccagttcgtgcaggagatgatcagacagctggagcagaccaactacagactgaagctgtgcgtgagcgacagagacgtgctgcccggcacctgcgtgtggagcatcgccagcgagctgatcgagaagagatgcagaagaatggtggtggtggtgagcgacgactacctgcagagcaaggagtgcgacttccagaccaagttcgccctgagcctgagccccggcgcccaccagaagagactgatccccatcaagtacaaggccatgaagaaggagttccccagcatcctgagattcatcaccgtgtgcgactacaccaacccctgcaccaagagctggttctggaccagactggccaaggccctgagcctgccctga

SEQ ID NO: 9024 - RNA, 891 nt, synthetic construct
  misc_feature 1..891: note = derived and/or modified sequence opt5 fromMyD88__Homo_sapiens__AAC50954
  source 1..891: mol_type = other RNA
atggccgctggcgggcccggagccggcagcgcggctcctgtgtcctctaccagctccctgccgctcgccgccctgaacatgagagtccggcgcagactttctctgttcctcaatgttcggacacaggtggctgccgactggacggctctggccgaggaaatggattttgagtaccttgaaatccgccaactggagacccaggcggaccccacagggagactcctggatgcctggcagggacggcctggcgctagcgtggggcgcctgctcgaactgcttaccaagctgggaagagacgatgtcctcctggagcttggcccctccattgaggaagactgccagaaatatatcctgaagcaacagcaggaggaagccgagaaacctctccaggtggctgccgttgattctagcgtgccccggacagcggagctggccggcattaccacactggacgatcctctcgggcacatgccggaacgcttcgacgcttttatctgttactgcccctccgatattcaattcgtccaggagatgatcagacagctggaacagaccaactatcggcttaagctgtgtgtgagcgaccgcgatgttctccctggaacgtgcgtgtggtctatcgcctccgagctgattgagaaaagatgtcggcgcatggtcgtggtggtcagcgacgactaccttcaatctaaggaatgcgattttcagaccaagttcgctctgtccctcagccccggcgcccatcagaaaagactgatccctattaagtataaagccatgaagaaagagtttccctctatcctgcggttcattacagtttgtgactacaccaatccgtgcacaaagtcctggttttggaccagactcgctaaggcgctgagccttccttga

SEQ ID NO: 9025 - protein, 655 aa, synthetic construct
  REGION 1..655: note = NALP10__Homo_sapiens__Q86W26
MAMAKARKPREALLWALSDLEENDFKKLKFYLRDMTLSEGQPPLARGELEGLIPVDLAELLISKYGEKEAVKVVLKGLKVMNLLELVDQLSHICLHDYREVYREHVRCLEEWQEAGVNGRYNQVLLVAKPSSESPESLACPFPEQELESVTVEALFDSGEKPSLAPSLVVLQGSAGTGKTTLARKMVLDWATGTLYPGRFDYVFYVSCKEVVLLLESKLEQLLFWCCGDNQAPVTEILRQPERLLFILDGFDELQRPFEEKLKKRGLSPKESLLHLLIRRHTLPTCSLLITTRPLALRNLEPLLKQARHVHILGFSEEERARYFSSYFTDEKQADRAFDIVQKNDILYKACQVPGICWVVCSWLQGQMERGKVVLETPRNSTDIFMAYVSTFLPPDDDGGCSELSRHRVLRSLCSLAAEGIQHQRFLFEEAELRKHNLDGPRLAAFLSSNDYQLGLAIKKFYSFRHISFQDFFHAMSYLVKEDQSRLGKESRREVQRLLEVKEQEGNDEMTLTMQFLLDISKKDSFSNLELKFCFRISPCLAQDLKHFKEQMESMKHNRTWDLEFSLYEAKIKNLVKGIQMNNVSFKIKHSNEKKSQSQNLFSVKSSLSHGPKEEQKCPSVHGQKEGKDNIAGTQKEASTGKGRGTEETPKNTYI

SEQ ID NO: 9026 - RNA, 1968 nt, synthetic construct
  misc_feature 1..1968: note = NALP10__Homo_sapiens__AAI04958
  source 1..1968: mol_type = other RNA
atggccatggccaaggccagaaagccccgggaggcattgctctgggccttgagtgaccttgaggagaacgatttcaagaagttaaagttctacttacgggatatgaccctgtctgagggccagcccccactggccagaggggagttggagggcctgattccggtggacctggcagaattactgatttcaaagtatggagaaaaggaggctgtgaaagttgtcctcaagggcttgaaggtcatgaacctgttggaacttgtggaccagctcagccatatttgtctgcatgattacagagaagtataccgagagcatgtgcgctgcctagaggaatggcaggaagcaggagtcaatggcagatacaaccaggtgctcctggtggccaagcccagctcagagagcccagaatcacttgcctgccccttcccggagcaggagctggagtctgtcacggtggaggctctatttgattcaggggaaaagccctcactggccccatccttagttgtgctacaggggtcggctggcactggaaagacaactctcgccagaaaaatggtgttggactgggccaccggtactctgtacccaggccggtttgattatgtcttttatgtaagctgcaaagaagtggtcctgctgctggagagcaaactggagcagctccttttctggtgctgcggggacaatcaagcccctgtcacagagattctgaggcagccagagcggctcctgttcatcctggatggctttgatgagctgcagaggccctttgaagaaaagttgaagaagaggggtttgagtcccaaggagagcctgctgcaccttctaattaggagacatacactccccacgtgctcccttctcatcaccacccggcccctggctttgaggaatctggagcccttgctgaaacaagcacgtcatgtccatatcctaggcttctctgaggaggagagggcgaggtacttcagctcctatttcacggatgagaagcaagctgaccgtgccttcgacattgtacagaaaaatgacattctctacaaagcgtgtcaggttccaggcatttgctgggtggtctgctcctggctgcaggggcagatggagagaggcaaagttgtcttagagacacctagaaacagcactgacatcttcatggcttacgtctccacctttctgccgcccgatgatgatgggggctgctccgagctttcccggcacagggtcctgaggagtctgtgctccctagcagctgaagggattcagcaccagaggttcctatttgaagaagctgagctcaggaaacataatttagatggccccaggcttgccgctttcctgagtagtaacgactaccaattgggacttgccatcaagaagttctacagcttccgccacatcagcttccaggacttttttcatgccatgtcttacctggtgaaagaggaccaaagccggctggggaaggagtcccgcagagaagtgcaaaggctgctggaggtaaaggagcaggaagggaatgatgagatgaccctcactatgcagtttttactggacatctcgaaaaaagacagcttctcgaacttggagctcaagttctgcttcagaatttctccctgtttagcgcaggatctgaagcattttaaagaacagatggaatctatgaagcacaacaggacctgggatttggaattctccctgtatgaagctaaaataaagaatctggtaaaaggtattcagatgaacaatgtatcattcaagataaaacattcaaatgaaaagaaatcacagagccagaatttattttctgtcaaaagcagcttgagtcatggacctaaggaggagcaaaaatgtccttctgtccatggacagaaggagggcaaagataatatagcaggaacacaaaaggaagcttctactggaaaaggcagagggacagaggaaacaccaaaaaatacttacatataa

SEQ ID NO: 9027 - RNA, 1968 nt, synthetic construct
  misc_feature 1..1968: note = derived and/or modified sequence opt1 fromNALP10__Homo_sapiens__AAI04958
  source 1..1968: mol_type = other RNA
atggccatggccaaggcgcgcaagccccgggaggccctgctctgggccctgagcgacctggaggagaacgacttcaagaagctcaagttctacctgcgcgacatgaccctgtccgagggccagccgcccctcgcccgcggggagctggagggcctgatccccgtggacctcgccgagctgctgatcagcaagtacggggagaaggaggcggtcaaggtggtgctcaagggcctgaaggtcatgaacctgctcgagctggtggaccagctgtcccacatctgcctccacgactaccgggaggtgtaccgggagcacgtccgctgcctggaggagtggcaggaggccggggtgaacggccggtacaaccaggtgctgctcgtcgccaagcccagctccgagagcccggagtccctggcctgccccttccccgagcaggagctggagagcgtgaccgtggaggcgctgttcgactccggcgagaagcccagcctggccccgtccctggtcgtgctccaggggagcgccggcacggggaagaccaccctggcccgcaagatggtgctggactgggccaccggcacgctctaccccgggcggttcgactacgtcttctacgtgtcctgcaaggaggtggtcctgctgctcgagagcaagctggagcagctgctgttctggtgctgcggcgacaaccaggcgcccgtgaccgagatcctgcgccagcccgagcggctcctcttcatcctggacggcttcgacgagctgcagcgcccgttcgaggagaagctcaagaagcgggggctgtcccccaaggagagcctgctccacctcctgatccgccggcacaccctcccgacctgctccctgctgatcacgacccgccccctggccctccggaacctggagcccctgctcaagcaggcccgccacgtgcacatcctgggcttcagcgaggaggagcgggcccgctacttctccagctacttcaccgacgagaagcaggccgaccgggcgttcgacatcgtccagaagaacgacatcctgtacaaggcctgccaggtgcccgggatctgctgggtggtctgcagctggctccagggccagatggagcgcggcaaggtggtcctggagacgccccgcaactccaccgacatcttcatggcctacgtgagcaccttcctgcccccggacgacgacgggggctgctccgagctcagccggcaccgcgtgctgcggtccctgtgcagcctcgccgccgaggggatccagcaccagcgcttcctgttcgaggaggcggagctgcggaagcacaacctcgacggcccccgcctggccgccttcctgtccagcaacgactaccagctcgggctggccatcaagaagttctactccttccggcacatcagcttccaggacttcttccacgccatgtcctacctggtcaaggaggaccagagccgcctcggcaaggagtcccggcgcgaggtgcagcggctgctggaggtgaaggagcaggagggcaacgacgagatgaccctcaccatgcagttcctgctggacatcagcaagaaggactccttcagcaacctcgagctgaagttctgcttccgcatctccccctgcctggcgcaggacctcaagcacttcaaggagcagatggagagcatgaagcacaaccggacgtgggacctggagttctccctgtacgaggccaagatcaagaacctcgtcaaggggatccagatgaacaacgtgagcttcaagatcaagcacagcaacgagaagaagtcccagagccagaacctgttctccgtcaagagctccctgagccacggccccaaggaggagcagaagtgcccgtccgtgcacgggcagaaggagggcaaggacaacatcgccgggacccagaaggaggccagcaccggcaagggccgcgggaccgaggagacgcccaagaacacctacatctga

SEQ ID NO: 9028 - RNA, 1968 nt, synthetic construct
  misc_feature 1..1968: note = derived and/or modified sequence opt2 fromNALP10__Homo_sapiens__AAI04958
  source 1..1968: mol_type = other RNA
atggccatggccaaggcccgcaagccccgcgaggccctcctctgggccctctccgacctcgaggagaacgacttcaagaagctcaagttctacctccgcgacatgaccctctccgagggccagccccccctcgcccgcggcgagctcgagggcctcatccccgtcgacctcgccgagctcctcatctccaagtacggcgagaaggaggccgtcaaggtcgtcctcaagggcctcaaggtcatgaacctcctcgagctcgtcgaccagctctcccacatctgcctccacgactaccgcgaggtctaccgcgagcacgtccgctgcctcgaggagtggcaggaggccggcgtcaacggccgctacaaccaggtcctcctcgtcgccaagccctcctccgagtcccccgagtccctcgcctgccccttccccgagcaggagctcgagtccgtcaccgtcgaggccctcttcgactccggcgagaagccctccctcgccccctccctcgtcgtcctccagggctccgccggcaccggcaagaccaccctcgcccgcaagatggtcctcgactgggccaccggcaccctctaccccggccgcttcgactacgtcttctacgtctcctgcaaggaggtcgtcctcctcctcgagtccaagctcgagcagctcctcttctggtgctgcggcgacaaccaggcccccgtcaccgagatcctccgccagcccgagcgcctcctcttcatcctcgacggcttcgacgagctccagcgccccttcgaggagaagctcaagaagcgcggcctctcccccaaggagtccctcctccacctcctcatccgccgccacaccctccccacctgctccctcctcatcaccacccgccccctcgccctccgcaacctcgagcccctcctcaagcaggcccgccacgtccacatcctcggcttctccgaggaggagcgcgcccgctacttctcctcctacttcaccgacgagaagcaggccgaccgcgccttcgacatcgtccagaagaacgacatcctctacaaggcctgccaggtccccggcatctgctgggtcgtctgctcctggctccagggccagatggagcgcggcaaggtcgtcctcgagaccccccgcaactccaccgacatcttcatggcctacgtctccaccttcctcccccccgacgacgacggcggctgctccgagctctcccgccaccgcgtcctccgctccctctgctccctcgccgccgagggcatccagcaccagcgcttcctcttcgaggaggccgagctccgcaagcacaacctcgacggcccccgcctcgccgccttcctctcctccaacgactaccagctcggcctcgccatcaagaagttctactccttccgccacatctccttccaggacttcttccacgccatgtcctacctcgtcaaggaggaccagtcccgcctcggcaaggagtcccgccgcgaggtccagcgcctcctcgaggtcaaggagcaggagggcaacgacgagatgaccctcaccatgcagttcctcctcgacatctccaagaaggactccttctccaacctcgagctcaagttctgcttccgcatctccccctgcctcgcccaggacctcaagcacttcaaggagcagatggagtccatgaagcacaaccgcacctgggacctcgagttctccctctacgaggccaagatcaagaacctcgtcaagggcatccagatgaacaacgtctccttcaagatcaagcactccaacgagaagaagtcccagtcccagaacctcttctccgtcaagtcctccctctcccacggccccaaggaggagcagaagtgcccctccgtccacggccagaaggagggcaaggacaacatcgccggcacccagaaggaggcctccaccggcaagggccgcggcaccgaggagacccccaagaacacctacatctga

SEQ ID NO: 9029 - RNA, 1968 nt, synthetic construct
  misc_feature 1..1968: note = derived and/or modified sequence opt3 fromNALP10__Homo_sapiens__AAI04958
  source 1..1968: mol_type = other RNA
atggccatggctaaggcaagaaaacccagggaggccctgctctgggcgcttagcgacctggaagagaacgatttcaagaaattgaagttttacttacgggacatgaccctgtccgaaggccagcctccactagctcgcggggagctcgaaggactgatcccggtggatcttgccgagctgttgatttctaaatatggtgagaaggaagcagtcaaggttgtgctcaaaggcctgaaggtaatgaatctgctcgagttagtggaccaactgtcacacatatgccttcatgattaccgagaagtctatcgtgagcacgtgagatgtttggaggaatggcaggaggccggggttaacggaaggtacaatcaggtgctgctagtcgctaaacccagtagcgaatcccctgagtctctcgcatgcccattccccgaacaggagctggagtcggtgacagtagaagccctttttgactcaggcgagaagcctagcctggctccaagtttggttgtgctccaaggttccgccgggactggaaaaacgaccctggcgcggaagatggtcttagattgggcaacaggcactctgtatcccggccgcttcgactacgtgttttatgtgtcttgtaaggaagtcgttctccttctggagagcaaattggaacagctactgttctggtgctgtggggataaccaggcccctgtgaccgagatcctcagacagccagagaggctgctttttattctggacggattcgatgaattgcaacggccgtttgaggaaaagctcaaaaagcgcggtctgtcccccaaagagtcattactgcatctactcatccgaagacacacactgcctacctgcagtcttttgattactacaaggccactggctctccggaatctggaaccccttctgaagcaggcccgtcatgtacacatcttgggcttcagcgaggaggaacgcgcaagatacttttcttcctacttcaccgacgagaaacaggctgatagggcctttgacatagtgcagaagaacgacatcctctataaggcgtgtcaagtccctgggatttgctgggtggtttgttcatggctgcagggacagatggaacggggcaaagtggtcttagagacgccacgaaatagcactgatatcttcatggcctacgtgagtaccttcctgcccccggacgatgacggtgggtgctctgagctatcccgccacagagtactcaggagcctgtgttcgcttgcagctgaaggcattcaacatcagcggtttttgttcgaggaagccgagctgcgcaagcacaacctcgatggacctagactggctgcctttttatcttccaatgactatcagctgggccttgcaatcaaaaagttctactcatttaggcatataagtttccaggatttcttccacgccatgagctatttggttaaagaagaccaatcccgtctcgggaaggagtctcggcgagaggtgcagagactgctagaagtcaaggagcaggaaggaaacgatgagatgacactgactatgcagtttctcctggacattagcaaaaaggattcattcagtaatcttgaattgaaattttgcttcaggatctccccctgcctggctcaagacttaaagcactttaaagagcagatggagagcatgaagcataaccgcacctgggacctcgaattttctctgtacgaggcgaagattaaaaatcttgtgaagggtatccagatgaacaatgtctcattcaaaatcaagcacagtaacgagaaaaagagccagtcccaaaacctgttttctgtgaagtcgagcttgtcccatggcccaaaagaagaacagaagtgtccttcagttcacgggcagaaagagggaaaggataatattgcaggcacacagaaagaggccagtaccggtaaggggcggggcacggaagagactcccaaaaacacatatatatga

SEQ ID NO: 9030 - RNA, 1968 nt, synthetic construct
  misc_feature 1..1968: note = derived and/or modified sequence opt4 fromNALP10__Homo_sapiens__AAI04958
  source 1..1968: mol_type = other RNA
atggccatggccaaggccagaaagcccagagaggccctgctgtgggccctgagcgacctggaggagaacgacttcaagaagctgaagttctacctgagagacatgaccctgagcgagggccagccccccctggccagaggcgagctggagggcctgatccccgtggacctggccgagctgctgatcagcaagtacggcgagaaggaggccgtgaaggtggtgctgaagggcctgaaggtgatgaacctgctggagctggtggaccagctgagccacatctgcctgcacgactacagagaggtgtacagagagcacgtgagatgcctggaggagtggcaggaggccggcgtgaacggcagatacaaccaggtgctgctggtggccaagcccagcagcgagagccccgagagcctggcctgccccttccccgagcaggagctggagagcgtgaccgtggaggccctgttcgacagcggcgagaagcccagcctggcccccagcctggtggtgctgcagggcagcgccggcaccggcaagaccaccctggccagaaagatggtgctggactgggccaccggcaccctgtaccccggcagattcgactacgtgttctacgtgagctgcaaggaggtggtgctgctgctggagagcaagctggagcagctgctgttctggtgctgcggcgacaaccaggcccccgtgaccgagatcctgagacagcccgagagactgctgttcatcctggacggcttcgacgagctgcagagacccttcgaggagaagctgaagaagagaggcctgagccccaaggagagcctgctgcacctgctgatcagaagacacaccctgcccacctgcagcctgctgatcaccaccagacccctggccctgagaaacctggagcccctgctgaagcaggccagacacgtgcacatcctgggcttcagcgaggaggagagagccagatacttcagcagctacttcaccgacgagaagcaggccgacagagccttcgacatcgtgcagaagaacgacatcctgtacaaggcctgccaggtgcccggcatctgctgggtggtgtgcagctggctgcagggccagatggagagaggcaaggtggtgctggagacccccagaaacagcaccgacatcttcatggcctacgtgagcaccttcctgccccccgacgacgacggcggctgcagcgagctgagcagacacagagtgctgagaagcctgtgcagcctggccgccgagggcatccagcaccagagattcctgttcgaggaggccgagctgagaaagcacaacctggacggccccagactggccgccttcctgagcagcaacgactaccagctgggcctggccatcaagaagttctacagcttcagacacatcagcttccaggacttcttccacgccatgagctacctggtgaaggaggaccagagcagactgggcaaggagagcagaagagaggtgcagagactgctggaggtgaaggagcaggagggcaacgacgagatgaccctgaccatgcagttcctgctggacatcagcaagaaggacagcttcagcaacctggagctgaagttctgcttcagaatcagcccctgcctggcccaggacctgaagcacttcaaggagcagatggagagcatgaagcacaacagaacctgggacctggagttcagcctgtacgaggccaagatcaagaacctggtgaagggcatccagatgaacaacgtgagcttcaagatcaagcacagcaacgagaagaagagccagagccagaacctgttcagcgtgaagagcagcctgagccacggccccaaggaggagcagaagtgccccagcgtgcacggccagaaggagggcaaggacaacatcgccggcacccagaaggaggccagcaccggcaagggcagaggcaccgaggagacccccaagaacacctacatctga

SEQ ID NO: 9031 - RNA, 1968 nt, synthetic construct
  misc_feature 1..1968: note = derived and/or modified sequence opt5 fromNALP10__Homo_sapiens__AAI04958
  source 1..1968: mol_type = other RNA
atggccatggctaaggccagaaaaccccgggaggcgctgctctgggctctgagcgaccttgaagagaacgatttcaagaaactgaagttttacctccgcgacatgaccctgtccgaaggccagcctccgcttgccagaggggagctggaaggactcatccccgtggatctggccgagctgctcatttctaaatatggcgagaaggaagctgtcaaggttgtgctgaaagggcttaaggtgatgaatctgctcgagctggtcgaccaacttagccacatctgcctgcatgattaccgggaagtgtatcgcgagcacgttagatgtctcgaggaatggcaggaggccggagtgaacggccggtacaatcaggtcctgctggtggctaaaccttcctctgaaagccccgagtccctcgcctgccctttccccgaacaggagctggagtctgttacagtggaagcgctttttgacagcggggagaagccttccctggccccgagcctcgtcgtgctgcaaggatctgctggcacgggcaaaaccacacttgcccgcaagatggtgctggattgggctaccgggacactctatcccggaagattcgactacgtcttttatgtttcctgtaaggaagtggtgctgctgctcgagagcaaactggaacagcttctgttctggtgctgtggcgataaccaggcccctgtcaccgagattctccggcagcccgagcgcctgctttttatcctggacgggttcgatgaactccaaagaccttttgaggaaaagctgaaaaagcggggactgtctcccaaagagtccctcctgcatcttctgattcgcagacacacactcccgacctgcagcctgctgatcacgacccggcctcttgcgctccgcaatctggaacccctgctcaagcaggccagacatgtgcacatcctgggcttctctgaggaggaacgggctagatacttttccagctacttcacagacgagaaacaggccgatcgcgcttttgacattgttcagaagaacgacatcctttataaggcctgtcaagtgcctgggatttgctgggtcgtgtgttcctggctgcagggacagatggaacggggcaaagttgtgctcgagacccccagaaattctacagatatcttcatggcctacgtcagcaccttcctgccccctgacgatgacggcgggtgctccgagctgagccgccaccgggtgcttagatctctctgttccctggctgcggaaggcattcaacatcagcgctttctgttcgaggaagccgagctccggaagcacaacctggatggaccgagacttgctgcctttctgagctctaatgactatcagctcgggctggccatcaaaaagttctacagctttcgccatatttccttccaggatttcttccacgctatgtcttatctggtcaaagaagaccaaagccggcttggaaaggagtccagacgcgaggtgcagcggctcctggaagttaaggagcaggaaggcaacgatgagatgacgctgacaatgcagtttctcctggacatcagcaaaaaggattctttctccaatcttgaactgaaattttgcttcagaatcagcccctgcctcgcccaagacctgaagcactttaaagagcagatggagtctatgaagcataaccggacctgggacctggaattttccctttacgaggcgaagattaaaaatctcgtgaaggggatccagatgaacaatgtcagcttcaaaattaagcactccaacgagaaaaagtctcagagccaaaacctgttttccgtgaagtctagcctgtcccatggacctaaagaagaacagaagtgtcccagcgttcacggccagaaagagggcaaggataatatcgctgggacacagaaagaggcctctaccggaaagggccgcgggaccgaagagacacctaaaaacacgtatatttga

SEQ ID NO: 9032 - protein, 1033 aa, synthetic construct
  REGION 1..1033: note = NALP11__Homo_sapiens__P59045
MAESDSTDFDLLWYLENLSDKEFQSFKKYLARKILDFKLPQFPLIQMTKEELANVLPISYEGQYIWNMLFSIFSMMRKEDLCRKIIGRRNRNQEACKAVMRRKFMLQWESHTFGKFHYKFFRDVSSDVFYILQLAYDSTSYYSANNLNVFLMGERASGKTIVINLAVLRWIKGEMWQNMISYVVHLTAHEINQMTNSSLAELIAKDWPDGQAPIADILSDPKKLLFILEDLDNIRFELNVNESALCSNSTQKVPIPVLLVSLLKRKMAPGCWFLISSRPTRGNNVKTFLKEVDCCTTLQLSNGKREIYFNSFFKDRQRASAALQLVHEDEILVGLCRVAILCWITCTVLKRQMDKGRDFQLCCQTPTDLHAHFLADALTSEAGLTANQYHLGLLKRLCLLAAGGLFLSTLNFSGEDLRCVGFTEADVSVLQAANILLPSNTHKDRYKFIHLNVQEFCTAIAFLMAVPNYLIPSGSREYKEKREQYSDFNQVFTFIFGLLNANRRKILETSFGYQLPMVDSFKWYSVGYMKHLDRDPEKLTHHMPLFYCLYENREEEFVKTIVDALMEVTVYLQSDKDMMVSLYCLDYCCHLRTLKLSVQRIFQNKEPLIRPTASQMKSLVYWREICSLFYTMESLRELHIFDNDLNGISERILSKALEHSSCKLRTLKLSYVSTASGFEDLLKALARNRSLTYLSINCTSISLNMFSLLHDILHEPTCQISHLSLMKCDLRASECEEIASLLISGGSLRKLTLSSNPLRSDGMNILCDALLHPNCTLISLVLVFCCLTENCCSALGRVLLFSPTLRQLDLCVNRLKNYGVLHVTFPLLFPTCQLEELHLSGCFFSSDICQYIAIVIATNEKLRSLEIGSNKIEDAGMQLLCGGLRHPNCMLVNIGLEECMLTSACCRSLASVLTTNKTLERLNLLQNHLGNDGVAKLLESLISPDCVLKVVGLPLTGLNTQTQQLLMTVKERKPSLIFLSETWSLKEGREIGVTPASQPGSIIPNSNLDYMFFKFPRMSAAMRTSNTASRQPL

SEQ ID NO: 9033 - RNA, 3102 nt, synthetic construct
  misc_feature 1..3102: note = NALP11__Homo_sapiens__CCDS12935.1
  source 1..3102: mol_type = other RNA
atggcagaatcggattctactgactttgacctgctgtggtatctagagaatctcagtgacaaggaatttcagagttttaagaagtatctggcacgcaagattcttgatttcaaactgccacagtttccactgatacagatgacaaaagaagaactggctaacgtgttgccaatctcttatgagggacagtatatatggaatatgctcttcagcatattttcaatgatgcgtaaggaagatctttgtaggaagatcattggcagacgaaaccgcaatcaggaggcatgcaaagctgtcatgaggagaaaattcatgctgcaatgggaaagtcacacttttggaaaatttcattataaattttttcgtgacgtttcgtcagatgtgttctacatacttcaattagcctatgattctaccagctattattcagcaaacaatctcaatgtgttcctgatgggagagagagcatctggaaaaactattgttataaatctggctgtgttgaggtggatcaagggtgagatgtggcagaacatgatctcgtacgtcgttcacctcactgctcacgaaataaaccagatgaccaacagcagcttggctgagctaatcgccaaggactggcctgacggccaggctcccattgcagacatcctgtctgatcccaagaaactccttttcatcctcgaggacttggacaacataagattcgagttaaatgtcaatgaaagtgctttgtgtagtaacagcacccagaaagttcccattccagttctcctggtcagtttgctgaagagaaaaatggctccaggctgctggttcctcatctcctcaaggcccacacgtgggaataatgtaaaaacgttcttgaaagaggtagattgctgcacgaccttgcagctgtcgaatgggaagagggagatatattttaactctttctttaaagaccgccagagggcgtcggcagccctccagcttgtacatgaggatgaaatactcgtgggtctgtgccgagtcgccatcttatgctggatcacgtgtactgtcctgaagcggcagatggacaaggggcgtgacttccagctctgctgccaaacacccactgatctacatgcccactttcttgctgatgcgttgacatcagaggctggacttactgccaatcagtatcacctaggtctcctaaaacgtctgtgtttgctggctgcaggaggactgtttctgagcaccctgaatttcagtggtgaagacctcagatgtgttgggtttactgaggctgatgtctctgtgttgcaggccgcgaatattcttttgccgagcaacactcataaagaccgttacaagttcatacacttgaacgtccaggagttttgtacagccattgcatttctgatggcagtacccaactatctgatcccctcaggcagcagagagtataaagagaagagagaacaatactctgactttaatcaagtgtttactttcatttttggtcttctaaatgcaaacaggagaaagattcttgagacatcctttggataccagctaccgatggtagacagcttcaagtggtactcggtgggatacatgaaacatttggaccgtgacccggaaaagttgacgcaccatatgcctttgttttactgtctctatgagaatcgggaagaagaatttgtgaagacgattgtggatgctctcatggaggttacagtttaccttcaatcagacaaggatatgatggtctcattatactgtctggattactgctgtcacctgaggacacttaagttgagtgttcagcgcatctttcaaaacaaagagccacttataaggccaactgctagtcaaatgaagagccttgtctactggagagagatctgctctcttttttatacaatggagagcctccgggagctgcatatctttgacaatgaccttaatggtatttcagaaaggattctgtctaaagccctggagcattctagctgtaaacttcgcacactcaagttgtcctatgtctcgactgcttctggttttgaagacttactcaaggctttggctcgtaatcggagcctgacatacctgagtatcaactgtacgtccatttccctaaatatgttttcacttctgcatgacatcctgcacgagcccacatgccaaataagtcatctgagcttgatgaaatgtgatttgcgagccagcgaatgtgaagaaatcgcctctctcctcatcagtggcgggagtctgagaaaactgaccttatccagcaatccgctgaggagcgacgggatgaacatactgtgtgatgccttgcttcatcccaactgcactcttatatcactggtgttagtcttctgctgtctcactgaaaattgctgcagcgcccttggaagagtgcttctgttcagcccaactctaagacaactagacctgtgtgtgaatcgcttaaaaaattacggagtgttgcatgtgacgtttcccttgctgtttccaacctgtcagttagaggagcttcatctgtctggctgtttctttagcagcgatatctgtcaatatattgccatagttattgctactaatgaaaaactgaggagcctggagattgggagcaacaaaatagaagatgcaggaatgcagctgctatgtggtggtttgagacatcccaactgcatgttggtgaatattgggctagaagagtgcatgttaaccagtgcctgctgtcgatctcttgcctctgttcttaccaccaacaaaacactagaaagactcaacttgcttcaaaatcacttgggcaatgatggagttgcaaaacttcttgagagcttgatcagcccagattgtgtacttaaggtagttgggcttccattaactggcctgaacacacaaacccagcagttgctgatgactgtaaaggaaagaaaacccagtttgatctttctgtctgaaacttggtctttaaaggaaggcagagaaattggtgtgacacctgcttctcagccaggttcaataatacctaattctaatttggattacatgtttttcaaatttcccagaatgtctgcagccatgagaacgtcaaatacagcatctaggcaacccctttga

SEQ ID NO: 9034 - RNA, 3102 nt, synthetic construct
  misc_feature 1..3102: note = derived and/or modified sequence opt1 fromNALP11__Homo_sapiens__CCDS12935.1
  source 1..3102: mol_type = other RNA
atggccgagagcgactccaccgacttcgacctgctctggtacctggagaacctgagcgacaaggagttccagtccttcaagaagtacctcgcccgcaagatcctggacttcaagctgccccagttcccgctcatccagatgaccaaggaggagctggcgaacgtgctgcccatcagctacgagggccagtacatctggaacatgctgttctccatcttcagcatgatgcggaaggaggacctgtgccgcaagatcatcgggcggcgcaaccggaaccaggaggcctgcaaggccgtcatgcgccggaagttcatgctgcagtgggagtcccacacgttcggcaagttccactacaagttcttccgcgacgtgagctccgacgtgttctacatcctccagctggcctacgacagcacctcctactacagcgccaacaacctgaacgtcttcctcatgggggagcgggcgtccggcaagaccatcgtgatcaacctggccgtgctgcgctggatcaagggggagatgtggcagaacatgatcagctacgtcgtgcacctcaccgcccacgagatcaaccagatgacgaactccagcctggccgagctgatcgcgaaggactggcccgacggccaggcccccatcgccgacatcctctccgacccgaagaagctgctgttcatcctcgaggacctggacaacatccggttcgagctgaacgtgaacgagagcgccctctgctccaacagcacccagaaggtccccatccccgtgctgctggtgagcctcctgaagcgcaagatggcccccggctgctggttcctgatctccagccggccgacccgcgggaacaacgtcaagaccttcctcaaggaggtggactgctgcacgaccctgcagctgtccaacggcaagcgggagatctacttcaacagcttcttcaaggaccgccagcgggcgtccgccgccctccagctggtgcacgaggacgagatcctggtcgggctctgccgcgtggccatcctgtgctggatcacgtgcaccgtgctgaagcggcagatggacaagggccgcgacttccagctctgctgccagacccccaccgacctgcacgcccacttcctggcggacgccctcaccagcgaggccgggctgaccgccaaccagtaccacctgggcctcctgaagcggctgtgcctgctcgccgcgggcgggctgttcctgtccacgctcaacttcagcggcgaggacctgcgctgcgtcgggttcaccgaggccgacgtgtccgtgctgcaggccgccaacatcctcctgcccagcaacacccacaaggaccgctacaagttcatccacctgaacgtccaggagttctgcaccgccatcgcgttcctcatggccgtgcccaactacctgatcccgtccggcagccgggagtacaaggagaagcgcgagcagtactccgacttcaaccaggtgttcacgttcatcttcggcctgctcaacgccaaccggcgcaagatcctggagaccagcttcgggtaccagctgcccatggtcgactccttcaagtggtacagcgtgggctacatgaagcacctcgaccgggaccccgagaagctgacccaccacatgcccctgttctactgcctctacgagaaccgcgaggaggagttcgtcaagaccatcgtggacgccctgatggaggtgacggtctacctgcagtccgacaaggacatgatggtgagcctctactgcctggactactgctgccacctccggaccctcaagctgtccgtgcagcgcatcttccagaacaaggagccgctgatccggcccaccgcgagccagatgaagtccctcgtctactggcgcgagatctgcagcctgttctacaccatggagagcctgcgggagctccacatcttcgacaacgacctgaacgggatctccgagcgcatcctgagcaaggccctcgagcactccagctgcaagctgcggacgctgaagctctcctacgtgagcaccgcctccggcttcgaggacctgctgaaggccctcgcccgcaaccggagcctgacctacctgtccatcaactgcaccagcatctccctcaacatgttcagcctgctgcacgacatcctccacgagcccacgtgccagatctcccacctgagcctgatgaagtgcgacctccgcgcgtccgagtgcgaggagatcgccagcctgctgatcagcgggggctccctccggaagctgaccctgagctccaaccccctccgcagcgacggcatgaacatcctgtgcgacgccctgctccacccgaactgcaccctgatctccctggtgctcgtcttctgctgcctgaccgagaactgctgcagcgccctggggcgggtgctcctgttctcccccacgctgcgccagctcgacctgtgcgtgaaccgcctgaagaactacggcgtcctccacgtgaccttccccctgctgttcccgacctgccagctcgaggagctgcacctgagcgggtgcttcttctccagcgacatctgccagtacatcgccatcgtgatcgcgaccaacgagaagctccggtccctggagatcggcagcaacaagatcgaggacgccgggatgcagctgctctgcggcggcctgcgccaccccaactgcatgctggtcaacatcgggctcgaggagtgcatgctgacctccgcctgctgccggagcctggcctccgtgctcacgaccaacaagaccctggagcgcctgaacctcctgcagaaccacctgggcaacgacggggtggccaagctcctggagagcctgatctcccccgactgcgtcctcaaggtggtgggcctgcccctgaccgggctgaacacgcagacccagcagctcctgatgaccgtcaaggagcggaagcccagcctgatcttcctctccgagacctggagcctgaaggagggccgcgagatcggcgtgacgccggcgagccagcccgggtccatcatccccaacagcaacctggactacatgttcttcaagttcccgcggatgtccgccgccatgcgcaccagcaacaccgcctcccggcagcccctctga

SEQ ID NO: 9035 - RNA, 3102 nt, synthetic construct
  misc_feature 1..3102: note = derived and/or modified sequence opt2 fromNALP11__Homo_sapiens__CCDS12935.1
  source 1..3102: mol_type = other RNA
atggccgagtccgactccaccgacttcgacctcctctggtacctcgagaacctctccgacaaggagttccagtccttcaagaagtacctcgcccgcaagatcctcgacttcaagctcccccagttccccctcatccagatgaccaaggaggagctcgccaacgtcctccccatctcctacgagggccagtacatctggaacatgctcttctccatcttctccatgatgcgcaaggaggacctctgccgcaagatcatcggccgccgcaaccgcaaccaggaggcctgcaaggccgtcatgcgccgcaagttcatgctccagtgggagtcccacaccttcggcaagttccactacaagttcttccgcgacgtctcctccgacgtcttctacatcctccagctcgcctacgactccacctcctactactccgccaacaacctcaacgtcttcctcatgggcgagcgcgcctccggcaagaccatcgtcatcaacctcgccgtcctccgctggatcaagggcgagatgtggcagaacatgatctcctacgtcgtccacctcaccgcccacgagatcaaccagatgaccaactcctccctcgccgagctcatcgccaaggactggcccgacggccaggcccccatcgccgacatcctctccgaccccaagaagctcctcttcatcctcgaggacctcgacaacatccgcttcgagctcaacgtcaacgagtccgccctctgctccaactccacccagaaggtccccatccccgtcctcctcgtctccctcctcaagcgcaagatggcccccggctgctggttcctcatctcctcccgccccacccgcggcaacaacgtcaagaccttcctcaaggaggtcgactgctgcaccaccctccagctctccaacggcaagcgcgagatctacttcaactccttcttcaaggaccgccagcgcgcctccgccgccctccagctcgtccacgaggacgagatcctcgtcggcctctgccgcgtcgccatcctctgctggatcacctgcaccgtcctcaagcgccagatggacaagggccgcgacttccagctctgctgccagacccccaccgacctccacgcccacttcctcgccgacgccctcacctccgaggccggcctcaccgccaaccagtaccacctcggcctcctcaagcgcctctgcctcctcgccgccggcggcctcttcctctccaccctcaacttctccggcgaggacctccgctgcgtcggcttcaccgaggccgacgtctccgtcctccaggccgccaacatcctcctcccctccaacacccacaaggaccgctacaagttcatccacctcaacgtccaggagttctgcaccgccatcgccttcctcatggccgtccccaactacctcatcccctccggctcccgcgagtacaaggagaagcgcgagcagtactccgacttcaaccaggtcttcaccttcatcttcggcctcctcaacgccaaccgccgcaagatcctcgagacctccttcggctaccagctccccatggtcgactccttcaagtggtactccgtcggctacatgaagcacctcgaccgcgaccccgagaagctcacccaccacatgcccctcttctactgcctctacgagaaccgcgaggaggagttcgtcaagaccatcgtcgacgccctcatggaggtcaccgtctacctccagtccgacaaggacatgatggtctccctctactgcctcgactactgctgccacctccgcaccctcaagctctccgtccagcgcatcttccagaacaaggagcccctcatccgccccaccgcctcccagatgaagtccctcgtctactggcgcgagatctgctccctcttctacaccatggagtccctccgcgagctccacatcttcgacaacgacctcaacggcatctccgagcgcatcctctccaaggccctcgagcactcctcctgcaagctccgcaccctcaagctctcctacgtctccaccgcctccggcttcgaggacctcctcaaggccctcgcccgcaaccgctccctcacctacctctccatcaactgcacctccatctccctcaacatgttctccctcctccacgacatcctccacgagcccacctgccagatctcccacctctccctcatgaagtgcgacctccgcgcctccgagtgcgaggagatcgcctccctcctcatctccggcggctccctccgcaagctcaccctctcctccaaccccctccgctccgacggcatgaacatcctctgcgacgccctcctccaccccaactgcaccctcatctccctcgtcctcgtcttctgctgcctcaccgagaactgctgctccgccctcggccgcgtcctcctcttctcccccaccctccgccagctcgacctctgcgtcaaccgcctcaagaactacggcgtcctccacgtcaccttccccctcctcttccccacctgccagctcgaggagctccacctctccggctgcttcttctcctccgacatctgccagtacatcgccatcgtcatcgccaccaacgagaagctccgctccctcgagatcggctccaacaagatcgaggacgccggcatgcagctcctctgcggcggcctccgccaccccaactgcatgctcgtcaacatcggcctcgaggagtgcatgctcacctccgcctgctgccgctccctcgcctccgtcctcaccaccaacaagaccctcgagcgcctcaacctcctccagaaccacctcggcaacgacggcgtcgccaagctcctcgagtccctcatctcccccgactgcgtcctcaaggtcgtcggcctccccctcaccggcctcaacacccagacccagcagctcctcatgaccgtcaaggagcgcaagccctccctcatcttcctctccgagacctggtccctcaaggagggccgcgagatcggcgtcacccccgcctcccagcccggctccatcatccccaactccaacctcgactacatgttcttcaagttcccccgcatgtccgccgccatgcgcacctccaacaccgcctcccgccagcccctctga

SEQ ID NO: 9036 - RNA, 3102 nt, synthetic construct
  misc_feature 1..3102: note = derived and/or modified sequence opt3 fromNALP11__Homo_sapiens__CCDS12935.1
  source 1..3102: mol_type = other RNA
atggccgagagcgactccaccgatttcgacctgctctggtaccttgaaaacctgtctgataaggagtttcagtcattcaaaaagtatttggctagaaaaatcttagactttaagctgccccaattccctctaattcagatgacaaaagaagaactcgcaaatgtgctgccaataagttacgaaggccagtatatctggaacatgctttttagcattttctccatgatgaggaaggaggatctgtgccggaagatcattgggcgccgaaatcgtaaccaggaggcctgtaaagcggtcatgagaaggaagtttatgttgcaatgggaatctcacactttcggaaaatttcattacaagttctttcgggacgtttcgtcagatgtgttctatatcctccagctggcttacgacagcacgagttattactccgccaataacctgaatgtatttctcatgggtgagcgcgcatctggcaaaaccatagtgatcaacttagccgtcctgagatggattaagggggaaatgtggcagaatatgatcagctacgtggttcaccttacagctcatgagattaaccagatgactaattcctcattggcagagctgatcgccaaggattggccggacggacaagctcccatagccgatattctaagtgaccctaaaaagctcctgttcatccttgaagatctggacaacattaggttcgagttgaatgtgaacgaaagcgcgctctgctctaattccacccagaaagtcccaatccccgtgctgttagtatcactgctcaagcggaaaatggcacctggctgttggtttcttatcagcagtcgcccaacacgaggtaacaacgttaagaccttcctgaaagaggtggactgctgtactacattgcagctatctaatgggaagagagaaatttattttaactccttctttaaggataggcagcgggccagcgctgccctgcaactcgtccacgaggacgagatactggtgggactttgccgtgtggcaatcctgtgttggattacctgcacggtcttgaaacgccagatggataagggcagagacttccagctctgttgccaaactcccaccgatctgcatgctcactttttagccgacgcgctgacatcggaagccggcctaactgcaaatcagtaccacctcgggctgcttaaaaggttgtgtctgctcgctgccggaggtctgttcctttctaccctgaacttttccggcgaggatttgcggtgcgttgggttcacagaagctgacgtgtcagtactccaggccgcaaatatcctgttacctagtaacacccataaggatcgatataaatttatacacctgaatgtgcaggagttctgcacggccattgcttttctaatggcggtcccaaactacctcatcccgagcggatcccgcgaatataaggagaagagagagcaatactctgacttcaatcaggtgttcacttttatcttcggcctgcttaacgcaaataggcggaaaattttggaaaccagctttggttatcagctgcccatggttgattcattcaagtggtacagtgtggggtacatgaaacatctcgaccgcgaccctgagaagctgacacaccacatgccattattttattgtctgtacgaaaacagagaggaagagttcgtcaaaactatcgtggatgcccttatggaggtaacagtttatttgcagtccgacaaggatatgatggtgagcctctactgcctggactattgttgccatctaaggaccctgaagctctctgtccaacgtatttttcagaataaagaacccctgatacggcctacggcttcacagatgaagagtcttgtgtactggcgagagatctgtagcttgttctataccatggaatccctgagagagttacacatttttgataacgacctcaatggaatctctgagaggatcctgtcgaaagcccttgaacatagctcctgcaagctgcgcacattgaaactctcatacgtcagtactgcatctggcttcgaggatctgctaaaggccctggctcggaacagaagcctcacctacctgtccattaactgtacatcaataagccttaatatgttttctttgctgcacgacatcttacatgaaccaacttgccagatttcccacctcagtctgatgaagtgtgatcttagggccagcgagtgcgaagagatcgcatctctgctaatttccggcgggtcactccgcaaactgaccttgagtagcaaccccctgcgatcggacggaatgaatatcttatgtgatgcgctcctgcacccgaactgcacacttatatccctggtgttggttttctgctgtctcaccgagaattgctgttctgctctgggtcgggtgctactgtttagccctactcttcgtcaactcgacctgtgcgtaaacagattgaagaattatggcgtcctgcatgtgacgttccccttactcttcccaacatgtcagctggaggagcttcacctgtcagggtgctttttcagttccgatatctgtcagtacattgccatcgttattgcaaccaacgaaaaattgaggtctctcgagatcggaagcaataagatagaagacgccggcatgcagctgctatgcggtgggctgcgccatcctaactgtatgcttgtgaatattggcctcgaggagtgcatgctgacttccgcttgttgccggtcattggccagcgtcttaaccacaaacaaaaccctggaaagactcaatctgcttcaaaaccacctgggaaatgacggcgtggcaaagttgctagagagtctgatctctcccgattgcgtactcaaagtggttgggctgccacttactggattaaacacacagacgcagcaactgctcatgaccgtcaaggaaaggaagccctccttgatttttctgagcgagacttggtcgctcaaagaaggtcgagagatcggcgtgacccctgcttcacagccagggtctataatcccgaacagtaatctggactatatgttctttaagttcccccgcatgtccgccgcgatgcggacaagcaacacagcctctagacagcctctttga

SEQ ID NO: 9037 - RNA, 3102 nt, synthetic construct
  misc_feature 1..3102: note = derived and/or modified sequence opt4 fromNALP11__Homo_sapiens__CCDS12935.1
  source 1..3102: mol_type = other RNA
atggccgagagcgacagcaccgacttcgacctgctgtggtacctggagaacctgagcgacaaggagttccagagcttcaagaagtacctggccagaaagatcctggacttcaagctgccccagttccccctgatccagatgaccaaggaggagctggccaacgtgctgcccatcagctacgagggccagtacatctggaacatgctgttcagcatcttcagcatgatgagaaaggaggacctgtgcagaaagatcatcggcagaagaaacagaaaccaggaggcctgcaaggccgtgatgagaagaaagttcatgctgcagtgggagagccacaccttcggcaagttccactacaagttcttcagagacgtgagcagcgacgtgttctacatcctgcagctggcctacgacagcaccagctactacagcgccaacaacctgaacgtgttcctgatgggcgagagagccagcggcaagaccatcgtgatcaacctggccgtgctgagatggatcaagggcgagatgtggcagaacatgatcagctacgtggtgcacctgaccgcccacgagatcaaccagatgaccaacagcagcctggccgagctgatcgccaaggactggcccgacggccaggcccccatcgccgacatcctgagcgaccccaagaagctgctgttcatcctggaggacctggacaacatcagattcgagctgaacgtgaacgagagcgccctgtgcagcaacagcacccagaaggtgcccatccccgtgctgctggtgagcctgctgaagagaaagatggcccccggctgctggttcctgatcagcagcagacccaccagaggcaacaacgtgaagaccttcctgaaggaggtggactgctgcaccaccctgcagctgagcaacggcaagagagagatctacttcaacagcttcttcaaggacagacagagagccagcgccgccctgcagctggtgcacgaggacgagatcctggtgggcctgtgcagagtggccatcctgtgctggatcacctgcaccgtgctgaagagacagatggacaagggcagagacttccagctgtgctgccagacccccaccgacctgcacgcccacttcctggccgacgccctgaccagcgaggccggcctgaccgccaaccagtaccacctgggcctgctgaagagactgtgcctgctggccgccggcggcctgttcctgagcaccctgaacttcagcggcgaggacctgagatgcgtgggcttcaccgaggccgacgtgagcgtgctgcaggccgccaacatcctgctgcccagcaacacccacaaggacagatacaagttcatccacctgaacgtgcaggagttctgcaccgccatcgccttcctgatggccgtgcccaactacctgatccccagcggcagcagagagtacaaggagaagagagagcagtacagcgacttcaaccaggtgttcaccttcatcttcggcctgctgaacgccaacagaagaaagatcctggagaccagcttcggctaccagctgcccatggtggacagcttcaagtggtacagcgtgggctacatgaagcacctggacagagaccccgagaagctgacccaccacatgcccctgttctactgcctgtacgagaacagagaggaggagttcgtgaagaccatcgtggacgccctgatggaggtgaccgtgtacctgcagagcgacaaggacatgatggtgagcctgtactgcctggactactgctgccacctgagaaccctgaagctgagcgtgcagagaatcttccagaacaaggagcccctgatcagacccaccgccagccagatgaagagcctggtgtactggagagagatctgcagcctgttctacaccatggagagcctgagagagctgcacatcttcgacaacgacctgaacggcatcagcgagagaatcctgagcaaggccctggagcacagcagctgcaagctgagaaccctgaagctgagctacgtgagcaccgccagcggcttcgaggacctgctgaaggccctggccagaaacagaagcctgacctacctgagcatcaactgcaccagcatcagcctgaacatgttcagcctgctgcacgacatcctgcacgagcccacctgccagatcagccacctgagcctgatgaagtgcgacctgagagccagcgagtgcgaggagatcgccagcctgctgatcagcggcggcagcctgagaaagctgaccctgagcagcaaccccctgagaagcgacggcatgaacatcctgtgcgacgccctgctgcaccccaactgcaccctgatcagcctggtgctggtgttctgctgcctgaccgagaactgctgcagcgccctgggcagagtgctgctgttcagccccaccctgagacagctggacctgtgcgtgaacagactgaagaactacggcgtgctgcacgtgaccttccccctgctgttccccacctgccagctggaggagctgcacctgagcggctgcttcttcagcagcgacatctgccagtacatcgccatcgtgatcgccaccaacgagaagctgagaagcctggagatcggcagcaacaagatcgaggacgccggcatgcagctgctgtgcggcggcctgagacaccccaactgcatgctggtgaacatcggcctggaggagtgcatgctgaccagcgcctgctgcagaagcctggccagcgtgctgaccaccaacaagaccctggagagactgaacctgctgcagaaccacctgggcaacgacggcgtggccaagctgctggagagcctgatcagccccgactgcgtgctgaaggtggtgggcctgcccctgaccggcctgaacacccagacccagcagctgctgatgaccgtgaaggagagaaagcccagcctgatcttcctgagcgagacctggagcctgaaggagggcagagagatcggcgtgacccccgccagccagcccggcagcatcatccccaacagcaacctggactacatgttcttcaagttccccagaatgagcgccgccatgagaaccagcaacaccgccagcagacagcccctgtga

SEQ ID NO: 9038 - RNA, 3102 nt, synthetic construct
  misc_feature 1..3102: note = derived and/or modified sequence opt5 fromNALP11__Homo_sapiens__CCDS12935.1
  source 1..3102: mol_type = other RNA
atggccgagagcgactccaccgatttcgacctgctctggtacctggaaaacctttctgataaggagtttcagagcttcaaaaagtatctggctagaaaaatcctcgactttaagctgccccaattccctcttattcagatgacaaaagaagaactggccaatgtgctcccgatctcctacgaaggccagtatatttggaacatgctgttttctatcttcagcatgatgcggaaggaggatctgtgccgcaagattatcgggagacggaatcgcaaccaggaggcgtgtaaagctgtcatgagacggaagtttatgctccaatgggaatcccacacgttcggaaaatttcattacaagttctttcgcgacgtttctagcgatgtgttctatatcctgcagcttgcctacgactccaccagctattactctgccaataacctgaatgtgtttctcatgggcgagagagcttccgggaaaacaattgtcatcaacctggccgtgcttcggtggattaagggagaaatgtggcagaatatgatcagctacgttgtgcacctgaccgctcatgagattaaccagatgacaaattcttccctcgccgagctgatcgcgaaggattggcccgacggccaagcccctattgctgatatcctgagcgaccccaaaaagctcctgttcatccttgaagatctggacaacattcgcttcgagctcaatgtcaacgaatctgccctgtgctccaatagcacccagaaagtgcctatccccgttcttctggtgtccctcctgaagagaaaaatggctcctgggtgttggtttctgatttctagccggccgacacgcggaaacaacgtcaagaccttcctcaaagaggtggactgctgtacgaccctgcagctttccaatggcaagagagaaatctattttaacagcttctttaaggatcggcagcgcgcctctgcggccctgcaactcgtgcacgaggacgagattctggtcggcctttgcagagttgctatcctgtgttggatcacatgcaccgtgctcaaacggcagatggataaggggagagacttccagctgtgttgccaaacacccaccgatctgcatgcccactttctcgctgacgccctgacgtccgaagccggacttacagctaatcagtaccacctgggcctcctgaaacgcctgtgtcttctcgcggccgggggactgttcctgagcaccctcaacttttctggcgaggatctgcggtgcgtggggttcacagaagctgacgtcagcgtgcttcaggccgccaatattctgctcccttccaacacccataaggatagatataaatttatccacctgaatgttcaggagttctgcaccgctattgcctttctgatggcggtgcccaactaccttatcccttctggaagccgcgaatataaggagaagcgggagcaatactccgacttcaatcaggtcttcacatttattttcggcctcctgaacgctaatagacgcaaaatcctggaaacgagctttggctatcagctccccatggtggattctttcaagtggtactccgttgggtacatgaaacatctggaccgggacccggagaaacttacccaccacatgcctctgttttattgtctctacgaaaacagagaggaagagttcgtgaagacaatcgtcgatgccctgatggaggtgaccgtctatctgcagagcgacaaggatatgatggtgtctctttactgcctcgactattgttgccatctgcgcacactgaagctctccgttcaacggatttttcagaataaagaacccctgatcagacctaccgccagccagatgaagtcccttgtgtactggcgcgagatttgttctctgttctatacgatggaaagcctccgggagctgcacatctttgataacgacctgaatggaatttccgagagaatcctttctaaagctctcgaacatagctcctgcaagctgcggacactgaaactcagctacgtctctaccgcctccggcttcgaggatctgcttaaggctctggcccgcaacagaagcctcacctacctgtctattaactgtacatccatcagcctgaatatgttttctcttctgcacgacatcctccatgaacccacatgccagattagccacctgtccctcatgaagtgtgatctgcgggcgagcgagtgcgaagagatcgcctctcttctgatttccgggggaagcctcagaaaactgacactgtcctctaacccccttcgcagcgacggcatgaatatcctgtgtgatgctctcctgcaccctaactgcacgctcatttccctggtgcttgttttctgctgtctgaccgagaattgctgttctgccctcgggcgggtgctgctgtttagcccgacacttagacaactggacctctgcgtcaaccgcctgaagaattatggagtgctccatgtgaccttccccctgcttttccctacatgtcagctggaggagctgcacctctccggctgctttttctctagcgatatctgtcagtacatcgctattgttatcgccaccaacgaaaaactgagatcccttgagattggcagcaataagatcgaagacgcggggatgcagctgctctgcggaggcctgcggcatcccaactgtatgctcgtcaatattgggctggaggagtgcatgcttacgtctgcctgttgccgctccctggctagcgtgctgaccacaaacaaaaccctcgaaagactgaatcttctgcaaaaccacctcggaaatgacggcgtggccaagctgctcgagtctctgatctcccctgattgcgtccttaaagtggttgggctgcccctgacaggcctcaacacccagacgcagcaactgcttatgacagtgaaggaacggaagccgagcctgatctttctctctgagacctggtccctgaaagaaggacgcgagattggcgtcacccctgctagccagcccgggtccatcattcctaacagcaatctcgactatatgttctttaagttccccagaatgtctgccgccatgcggaccagcaacaccgcttcccgccagcctctgtga

SEQ ID NO: 9039 - protein, 1061 aa, synthetic construct
  REGION 1..1061: note = NALP12__Homo_sapiens__P59046
MLRTAGRDGLCRLSTYLEELEAVELKKFKLYLGTATELGEGKIPWGSMEKAGPLEMAQLLITHFGPEEAWRLALSTFERINRKDLWERGQREDLVRDTPPGGPSSLGNQSTCLLEVSLVTPRKDPQETYRDYVRRKFRLMEDRNARLGECVNLSHRYTRLLLVKEHSNPMQVQQQLLDTGRGHARTVGHQASPIKIETLFEPDEERPEPPRTVVMQGAAGIGKSMLAHKVMLDWADGKLFQGRFDYLFYINCREMNQSATECSMQDLIFSCWPEPSAPLQELIRVPERLLFIIDGFDELKPSFHDPQGPWCLCWEEKRPTELLLNSLIRKKLLPELSLLITTRPTALEKLHRLLEHPRHVEILGFSEAERKEYFYKYFHNAEQAGQVFNYVRDNEPLFTMCFVPLVCWVVCTCLQQQLEGGGLLRQTSRTTTAVYMLYLLSLMQPKPGAPRLQPPPNQRGLCSLAADGLWNQKILFEEQDLRKHGLDGEDVSAFLNMNIFQKDINCERYYSFIHLSFQEFFAAMYYILDEGEGGAGPDQDVTRLLTEYAFSERSFLALTSRFLFGLLNEETRSHLEKSLCWKVSPHIKMDLLQWIQSKAQSDGSTLQQGSLEFFSCLYEIQEEEFIQQALSHFQVIVVSNIASKMEHMVSSFCLKRCRSAQVLHLYGATYSADGEDRARCSAGAHTLLVQLPERTVLLDAYSEHLAAALCTNPNLIELSLYRNALGSRGVKLLCQGLRHPNCKLQNLRLKRCRISSSACEDLSAALIANKNLTRMDLSGNGVGFPGMMLLCEGLRHPQCRLQMIQLRKCQLESGACQEMASVLGTNPHLVELDLTGNALEDLGLRLLCQGLRHPVCRLRTLWLKICRLTAAACDELASTLSVNQSLRELDLSLNELGDLGVLLLCEGLRHPTCKLQTLRLGICRLGSAACEGLSVVLQANHNLRELDLSFNDLGDWGLWLLAEGLQHPACRLQKLWLDSCGLTAKACENLYFTLGINQTLTDLYLTNNALGDTGVRLLCKRLSHPGCKLRVLWLFGMDLNKMTHSRLAALRVTKPYLDIGC

SEQ ID NO: 9040 - RNA, 3186 nt, synthetic construct
  misc_feature 1..3186: note = NALP12__Homo_sapiens__AAH28069
  source 1..3186: mol_type = other RNA
atgctacgaaccgcaggcagggacggcctctgtcgcctgtccacctacttggaagaactcgaggctgtggaactgaagaagttcaagttatacctggggaccgcgacagagctgggagaaggcaagatcccctggggaagcatggagaaggccggtcccctggaaatggcccagctgctcatcacccacttcgggccagaggaggcctggaggttggctctcagcacctttgagcggataaacaggaaggacctgtgggagagaggacagagagaggacctggtgagggataccccacctggtggcccgtcctcacttgggaaccagtcaacatgccttctggaagtctctcttgtcactccaagaaaagatccccaggaaacctacagggactatgtccgcaggaaattccggctcatggaagaccgcaatgcgcgcctaggggaatgtgtcaacctcagccaccggtacacccggctcctgctggtgaaggagcactcaaaccccatgcaggtccagcagcagcttctggacacaggccggggacacgcgaggaccgtgggacaccaggctagccccatcaagatagagaccctctttgagccagacgaggagcgccccgagccaccgcgcaccgtggtcatgcaaggcgcggcagggataggcaagtccatgctggcacacaaggtgatgctggactgggcggacgggaagctcttccaaggcagatttgattatctcttctacatcaactgcagggagatgaaccagagtgccacggaatgcagcatgcaagacctcatcttcagctgctggcctgagcccagcgcgcctctccaggagctcatccgagttcccgagcgcctccttttcatcatcgacggcttcgatgagctcaagccttctttccacgatcctcagggaccctggtgcctctgctgggaggagaaacggcccacggagctgcttcttaacagcttaattcggaagaagctgctccctgagctatctttgctcatcaccacacggcccacggctttggagaagctccaccgtctgctggagcaccccaggcatgtggagatcctgggcttctctgaggcagaaaggaaggaatacttctacaagtatttccacaatgcagagcaggcgggccaagtcttcaattacgtgagggacaacgagcctctcttcaccatgtgcttcgtccccctggtgtgctgggtggtgtgtacctgcctccagcagcagctggagggtggggggctgttgagacagacgtccaggaccaccactgcagtgtacatgctctacctgctgagtctgatgcaacccaagccgggggccccgcgcctccagcccccacccaaccagagagggttgtgctccttggcggcagatgggctctggaatcagaaaatcctatttgaggagcaggacctccggaagcacggcctagacggggaagacgtctctgccttcctcaacatgaacatcttccagaaggacatcaactgtgagaggtactacagcttcatccacttgagtttccaggaattctttgcagctatgtactatatcctggacgagggggagggcggggcaggcccagaccaggacgtgaccaggctgttgaccgagtacgcgttttctgaaaggagcttcctggcactcaccagccgcttcctgtttggactcctgaacgaggagaccaggagccacctggagaagagtctctgctggaaggtctcgccgcacatcaagatggacctgttgcagtggatccaaagcaaagctcagagcgacggctccaccctgcagcagggctccttggagttcttcagctgcttgtacgagatccaggaggaggagtttatccagcaggccctgagccacttccaggtgatcgtggtcagcaacattgcctccaagatggagcacatggtctcctcgttctgtctgaagcgctgcaggagcgcccaggtgctgcacttgtatggcgccacctacagcgcggacggggaagaccgcgcgaggtgctccgcaggagcgcacacgctgttggtgcagctaccagagaggaccgttctgctggacgcctacagtgaacatctggcagcggccctgtgcaccaatccaaacctgatagagctgtctctgtaccgaaatgccctgggcagccggggggtgaagctgctctgtcaaggactcagacaccccaactgcaaacttcagaacctgaggctgaagaggtgccgcatctccagctcagcctgcgaggacctctctgcagctctcatagccaataagaatttgacaaggatggatctcagtggcaacggcgttggattcccaggcatgatgctgctttgcgagggcctgcggcatccccagtgcaggctgcagatgattcagttgaggaagtgtcagctggagtccggggcttgtcaggagatggcttctgtgctcggcaccaacccacatctggttgagttggacctgacaggaaatgcactggaggatttgggcctgaggttactatgccagggactgaggcacccagtctgcagactacggactttgtggctgaagatctgccgcctcactgctgctgcctgtgacgagctggcctcaactctcagtgtgaaccagagcctgagagagctggacctgagcctgaatgagctgggggacctcggggtgctgctgctgtgtgagggcctcaggcatcccacgtgcaagctccagaccctgcggttgggcatctgccggctgggctctgccgcctgtgagggtctttctgtggtgctccaggccaaccacaacctccgggagctggacttgagtttcaacgacctgggagactggggcctgtggttgctggctgaggggctgcaacatcccgcctgcagactccagaaactgtggctggatagctgtggcctcacagccaaggcttgtgagaatctttacttcaccctggggatcaaccagaccttgaccgacctttacctgaccaacaacgccctaggggacacaggtgtccgactgctttgcaagcggctgagccatcctggctgcaaactccgagtcctctggttatttgggatggacctgaataaaatgacccacagtaggttggcagcgcttcgagtaacaaaaccttatttggacattggctgctga

SEQ ID NO: 9041 - RNA, 3186 nt, synthetic construct
  misc_feature 1..3186: note = derived and/or modified sequence opt1 fromNALP12__Homo_sapiens__AAH28069
  source 1..3186: mol_type = other RNA
atgctgcgcaccgccggccgggacgggctctgccgcctgagcacctacctggaggagctcgaggccgtggagctgaagaagttcaagctgtacctcggcacggcgaccgagctgggggagggcaagatcccctgggggtccatggagaaggccggcccgctggagatggcccagctcctgatcacccacttcggccccgaggaggcctggcggctggccctcagcaccttcgagcgcatcaaccggaaggacctgtgggagcgcgggcagcgggaggacctggtccgcgacacgccgcccggcgggccctccagcctcggcaaccagtccacgtgcctgctggaggtgagcctcgtgacgccccggaaggacccccaggagacctaccgcgactacgtccggcgcaagttccggctgatggaggaccgcaacgcgcggctgggggagtgcgtgaacctctcccaccgctacacccggctgctgctcgtgaaggagcacagcaaccccatgcaggtccagcagcagctgctggacaccggccgcggccacgcccggaccgtggggcaccaggcctccccgatcaagatcgagaccctcttcgagcccgacgaggagcgccccgagcccccgcggaccgtggtcatgcagggcgccgcggggatcggcaagagcatgctggcccacaaggtgatgctggactgggccgacggcaagctgttccaggggcgcttcgactacctgttctacatcaactgccgcgagatgaaccagtccgccaccgagtgcagcatgcaggacctgatcttctcctgctggcccgagcccagcgcgcccctccaggagctgatccgggtgccggagcgcctcctcttcatcatcgacggcttcgacgagctgaagccctccttccacgacccccaggggccctggtgcctgtgctgggaggagaagcggccgaccgagctcctgctgaacagcctcatccgcaagaagctgctgcccgagctctccctgctgatcaccacgcggcccaccgccctcgagaagctgcaccgcctgctggagcacccccggcacgtcgagatcctcggcttcagcgaggccgagcgcaaggagtacttctacaagtacttccacaacgccgagcaggccggccaggtgttcaactacgtgcgggacaacgagccgctgttcaccatgtgcttcgtccccctggtgtgctgggtggtctgcacgtgcctccagcagcagctggagggcggcgggctgctccgccagacctcccggaccaccaccgccgtgtacatgctgtacctgctcagcctgatgcagcccaagcccggggcgccgcgcctgcagccgccgcccaaccagcgggggctctgcagcctggccgccgacggcctgtggaaccagaagatcctcttcgaggagcaggacctgcgcaagcacgggctggacggcgaggacgtgtccgccttcctcaacatgaacatcttccagaaggacatcaactgcgagcggtactacagcttcatccacctgtccttccaggagttcttcgccgcgatgtactacatcctggacgagggcgagggcggggccgggcccgaccaggacgtcacgcgcctcctgaccgagtacgccttcagcgagcggtccttcctggccctcaccagccgcttcctgttcggcctgctcaacgaggagacccggtcccacctggagaagtccctgtgctggaaggtgagcccccacatcaagatggacctcctgcagtggatccagagcaaggcccagtccgacgggagcacgctgcagcagggctccctcgagttcttcagctgcctgtacgagatccaggaggaggagttcatccagcaggcgctgtcccacttccaggtgatcgtcgtgagcaacatcgcctccaagatggagcacatggtcagctccttctgcctcaagcgctgccgcagcgcccaggtgctgcacctgtacggcgccacctacagcgcggacggggaggaccgggcccgctgctccgccggcgcccacaccctcctggtgcagctgcccgagcggaccgtcctcctggacgcctacagcgagcacctggcggccgccctctgcacgaaccccaacctgatcgagctgtccctctaccgcaacgccctggggagccggggcgtgaagctgctctgccagggcctgcgccaccccaactgcaagctgcagaacctccggctgaagcgctgccggatctccagctccgcctgcgaggacctgagcgcggccctcatcgccaacaagaacctgacccgcatggacctgtccgggaacggcgtggggttccccggcatgatgctcctgtgcgaggggctgcggcacccccagtgccgcctccagatgatccagctgcggaagtgccagctggagagcggcgcctgccaggagatggcctccgtcctcggcaccaacccgcacctggtggagctggacctcaccgggaacgcgctggaggacctgggcctccgcctgctgtgccaggggctccggcaccccgtgtgccgcctgcggacgctgtggctcaagatctgccgcctgaccgccgccgcctgcgacgagctggcgagcaccctctccgtcaaccagagcctgcgggagctggacctctccctgaacgagctgggcgacctcggggtgctgctgctctgcgagggcctgcgccacccgacctgcaagctgcagaccctccggctgggcatctgccgcctggggagcgccgcctgcgagggcctgtccgtggtcctccaggccaaccacaacctgcgcgagctggacctcagcttcaacgacctgggggactggggcctgtggctcctggccgaggggctgcagcaccccgcgtgccggctccagaagctgtggctggacagctgcggcctcacggccaaggcctgcgagaacctgtacttcaccctgggcatcaaccagaccctcaccgacctgtacctgacgaacaacgccctcggggacaccggcgtgcgcctgctgtgcaagcggctctcccaccccgggtgcaagctgcgcgtgctgtggctgttcggcatggacctcaacaagatgacccacagccggctggccgcgctccgcgtcaccaagccctacctggacatcgggtgctga

SEQ ID NO: 9042 - RNA, 3186 nt, synthetic construct
  misc_feature 1..3186: note = derived and/or modified sequence opt2 fromNALP12__Homo_sapiens__AAH28069
  source 1..3186: mol_type = other RNA
atgctccgcaccgccggccgcgacggcctctgccgcctctccacctacctcgaggagctcgaggccgtcgagctcaagaagttcaagctctacctcggcaccgccaccgagctcggcgagggcaagatcccctggggctccatggagaaggccggccccctcgagatggcccagctcctcatcacccacttcggccccgaggaggcctggcgcctcgccctctccaccttcgagcgcatcaaccgcaaggacctctgggagcgcggccagcgcgaggacctcgtccgcgacaccccccccggcggcccctcctccctcggcaaccagtccacctgcctcctcgaggtctccctcgtcaccccccgcaaggacccccaggagacctaccgcgactacgtccgccgcaagttccgcctcatggaggaccgcaacgcccgcctcggcgagtgcgtcaacctctcccaccgctacacccgcctcctcctcgtcaaggagcactccaaccccatgcaggtccagcagcagctcctcgacaccggccgcggccacgcccgcaccgtcggccaccaggcctcccccatcaagatcgagaccctcttcgagcccgacgaggagcgccccgagcccccccgcaccgtcgtcatgcagggcgccgccggcatcggcaagtccatgctcgcccacaaggtcatgctcgactgggccgacggcaagctcttccagggccgcttcgactacctcttctacatcaactgccgcgagatgaaccagtccgccaccgagtgctccatgcaggacctcatcttctcctgctggcccgagccctccgcccccctccaggagctcatccgcgtccccgagcgcctcctcttcatcatcgacggcttcgacgagctcaagccctccttccacgacccccagggcccctggtgcctctgctgggaggagaagcgccccaccgagctcctcctcaactccctcatccgcaagaagctcctccccgagctctccctcctcatcaccacccgccccaccgccctcgagaagctccaccgcctcctcgagcacccccgccacgtcgagatcctcggcttctccgaggccgagcgcaaggagtacttctacaagtacttccacaacgccgagcaggccggccaggtcttcaactacgtccgcgacaacgagcccctcttcaccatgtgcttcgtccccctcgtctgctgggtcgtctgcacctgcctccagcagcagctcgagggcggcggcctcctccgccagacctcccgcaccaccaccgccgtctacatgctctacctcctctccctcatgcagcccaagcccggcgccccccgcctccagcccccccccaaccagcgcggcctctgctccctcgccgccgacggcctctggaaccagaagatcctcttcgaggagcaggacctccgcaagcacggcctcgacggcgaggacgtctccgccttcctcaacatgaacatcttccagaaggacatcaactgcgagcgctactactccttcatccacctctccttccaggagttcttcgccgccatgtactacatcctcgacgagggcgagggcggcgccggccccgaccaggacgtcacccgcctcctcaccgagtacgccttctccgagcgctccttcctcgccctcacctcccgcttcctcttcggcctcctcaacgaggagacccgctcccacctcgagaagtccctctgctggaaggtctccccccacatcaagatggacctcctccagtggatccagtccaaggcccagtccgacggctccaccctccagcagggctccctcgagttcttctcctgcctctacgagatccaggaggaggagttcatccagcaggccctctcccacttccaggtcatcgtcgtctccaacatcgcctccaagatggagcacatggtctcctccttctgcctcaagcgctgccgctccgcccaggtcctccacctctacggcgccacctactccgccgacggcgaggaccgcgcccgctgctccgccggcgcccacaccctcctcgtccagctccccgagcgcaccgtcctcctcgacgcctactccgagcacctcgccgccgccctctgcaccaaccccaacctcatcgagctctccctctaccgcaacgccctcggctcccgcggcgtcaagctcctctgccagggcctccgccaccccaactgcaagctccagaacctccgcctcaagcgctgccgcatctcctcctccgcctgcgaggacctctccgccgccctcatcgccaacaagaacctcacccgcatggacctctccggcaacggcgtcggcttccccggcatgatgctcctctgcgagggcctccgccacccccagtgccgcctccagatgatccagctccgcaagtgccagctcgagtccggcgcctgccaggagatggcctccgtcctcggcaccaacccccacctcgtcgagctcgacctcaccggcaacgccctcgaggacctcggcctccgcctcctctgccagggcctccgccaccccgtctgccgcctccgcaccctctggctcaagatctgccgcctcaccgccgccgcctgcgacgagctcgcctccaccctctccgtcaaccagtccctccgcgagctcgacctctccctcaacgagctcggcgacctcggcgtcctcctcctctgcgagggcctccgccaccccacctgcaagctccagaccctccgcctcggcatctgccgcctcggctccgccgcctgcgagggcctctccgtcgtcctccaggccaaccacaacctccgcgagctcgacctctccttcaacgacctcggcgactggggcctctggctcctcgccgagggcctccagcaccccgcctgccgcctccagaagctctggctcgactcctgcggcctcaccgccaaggcctgcgagaacctctacttcaccctcggcatcaaccagaccctcaccgacctctacctcaccaacaacgccctcggcgacaccggcgtccgcctcctctgcaagcgcctctcccaccccggctgcaagctccgcgtcctctggctcttcggcatggacctcaacaagatgacccactcccgcctcgccgccctccgcgtcaccaagccctacctcgacatcggctgctga

SEQ ID NO: 9043 - RNA, 3186 nt, synthetic construct
  misc_feature 1..3186: note = derived and/or modified sequence opt3 fromNALP12__Homo_sapiens__AAH28069
  source 1..3186: mol_type = other RNA
atgctgagaaccgccggcagggacgggctctgccggcttagcacatacctggaggaattggaggctgtggaattaaagaaattcaagctgtatctaggaactgcaacggagctcggtgaaggcaaaatcccctgggggtccatggagaaggccggacctctggagatggcgcagcttctgattacccactttggcccagaagaggcttggcgcttggccctctctacattcgaacgaataaaccgtaaagatctgtgggagagaggtcaaagggaggacctggtccgggatactccgcccgggggaccttcaagtctcggcaatcagagcacctgtttactggaagtttcccttgtgacaccacgcaaggacccccaggagacctacagagattatgtaaggcggaagtttcgcttgatggaagaccgaaacgcaagactgggcgagtgcgtgaatctatctcataggtacactcggctcctgcttgtcaaagaacactcgaaccctatgcaagtgcaacagcagctgttggatacagggcgtggacatgcccgcaccgttggtcaccaggcttcaccaatcaagattgagacgttgttcgagcccgacgaagagagacctgaaccaccgaggactgtggtcatgcaaggcgcagccgggatcggaaaaagcatgctggctcataaggtgatgttagattgggccgacggcaaactgtttcagggtcggttcgattatctcttttacattaattgtcgagagatgaaccagagtgcgaccgaatgctccatgcaggaccttatcttctcttgttggcccgagcctagcgcaccactgcaagagttgatacgcgtacccgaaagactactgtttatcattgatgggttcgacgagctcaagccttcctttcacgacccacagggaccctggtgcctgtgttgggaagagaagaggccgacagaacttctgctcaattcactcatccggaaaaagctgttacctgagctgagtctactcattactacccgccccacagccctggagaaacttcacagattgctggaacatccaaggcacgttgagatcctcggcttcagcgaagctgagcgtaaggagtatttttacaaatacttccataacgccgaacaggcaggccaagtgttcaattatgtccgggataacgagcctctgtttaccatgtgcttcgtgccccttgtgtgttgggtcgtttgcacgtgtctgcagcagcagttggaagggggaggtctcctgcgacaaacttctagaacaaccactgctgtgtacatgttatatctgctatccctcatgcagccaaagcccggcgcccctaggctgcagccaccgcccaatcagcgcgggctttgctcattggcggccgacggactgtggaaccagaaaatactctttgaggaacaggatctgcggaagcacggcttagacggtgaggatgtaagcgcattcctgaatatgaacatttttcagaaggacatcaattgcgagagatactatagtttcattcacctttcttttcaggagttctttgctgccatgtactatatcttggatgaaggggaaggcggagctggccctgaccaagatgtgacaaggctcctgaccgagtacgccttctccgaacgcagctttctagcactgacgtcgcgattcctctttgggctgcttaacgaggagacccggtctcatttggaaaaatccctgtgttggaaggtctcaccacacatcaaaatggacttactccagtggattcagagtaaggcccagagcgatggatccacactgcaacagggttctcttgagttcttcagctgcctgtacgaaatacaggaggaagagtttatccaacaggctttgtcacatttccaggtgattgttgtgagtaacatcgcgtccaaaatggagcacatggtcagctctttttgtctcaagcgttgcagatcagcacaggtgctgcatctatatggcgccacttacagtgctgacggggaagacagggcccgctgtagcgcaggagcccacaccctgctcgtacaactgcccgagcggacagttcttttggatgcttattccgaacacctggccgcagcgttatgcactaatcctaacctcatagagctgtctctttacagaaatgctctgggctcgaggggtgtgaagctactctgtcaggggctgcgacatccaaactgcaaattgcagaatctgcgcttaaagcggtgtagaattagctcctcagcctgcgaggacctcagtgcagccctgatcgctaacaaaaatcttaccaggatggatctgtctggcaacggagtcggcttccccgggatgatgttgctctgtgaaggactgcgtcacccgcagtgccgcctacaaatgatccagctgcggaagtgccagcttgagagcggtgcctgtcaggaaatggcatccgtgctcggcacaaatcctcatctggtcgagttggacctgaccgggaacgctttagaagatctcggactgagacttctgtgccaaggcttgaggcacccagtgtgtcgactccggactctgtggctaaaaatttgccgcctgacggccgcggcctgtgacgagcttgcttcaacactcagcgttaatcagtctctgagagagttggatttatccctgaacgaactcggtgacctgggggtgcttctgttgtgcgagggcctaaggcaccccacctgtaagctgcagactctccggctgggaatctgccgacttggcagtgcagcctgtgaagggttaagcgtagtcctgcaagctaatcataacctcagagagttggatctgtcttttaatgacctcggagattggggcctgtggcttctggccgaaggtttgcagcaccctgcatgccgcctacagaagctgtggctcgactcctgtgggttaaccgcgaaagcctgcgagaacctgtatttcacacttggaattaaccagaccctgactgatctctacttgacaaataacgctctgggcgacacgggtgtgaggctcctgtgcaagcgtctttcacatcccggctgtaaactacgggttctgtggttgtttgggatggacttaaataagatgacccacagtagactggccgcactcagggtgactaaaccatatctggatataggatgctga

SEQ ID NO: 9044 - RNA, 3186 nt, synthetic construct
  misc_feature 1..3186: note = derived and/or modified sequence opt4 fromNALP12__Homo_sapiens__AAH28069
  source 1..3186: mol_type = other RNA
atgctgagaaccgccggcagagacggcctgtgcagactgagcacctacctggaggagctggaggccgtggagctgaagaagttcaagctgtacctgggcaccgccaccgagctgggcgagggcaagatcccctggggcagcatggagaaggccggccccctggagatggcccagctgctgatcacccacttcggccccgaggaggcctggagactggccctgagcaccttcgagagaatcaacagaaaggacctgtgggagagaggccagagagaggacctggtgagagacaccccccccggcggccccagcagcctgggcaaccagagcacctgcctgctggaggtgagcctggtgacccccagaaaggacccccaggagacctacagagactacgtgagaagaaagttcagactgatggaggacagaaacgccagactgggcgagtgcgtgaacctgagccacagatacaccagactgctgctggtgaaggagcacagcaaccccatgcaggtgcagcagcagctgctggacaccggcagaggccacgccagaaccgtgggccaccaggccagccccatcaagatcgagaccctgttcgagcccgacgaggagagacccgagccccccagaaccgtggtgatgcagggcgccgccggcatcggcaagagcatgctggcccacaaggtgatgctggactgggccgacggcaagctgttccagggcagattcgactacctgttctacatcaactgcagagagatgaaccagagcgccaccgagtgcagcatgcaggacctgatcttcagctgctggcccgagcccagcgcccccctgcaggagctgatcagagtgcccgagagactgctgttcatcatcgacggcttcgacgagctgaagcccagcttccacgacccccagggcccctggtgcctgtgctgggaggagaagagacccaccgagctgctgctgaacagcctgatcagaaagaagctgctgcccgagctgagcctgctgatcaccaccagacccaccgccctggagaagctgcacagactgctggagcaccccagacacgtggagatcctgggcttcagcgaggccgagagaaaggagtacttctacaagtacttccacaacgccgagcaggccggccaggtgttcaactacgtgagagacaacgagcccctgttcaccatgtgcttcgtgcccctggtgtgctgggtggtgtgcacctgcctgcagcagcagctggagggcggcggcctgctgagacagaccagcagaaccaccaccgccgtgtacatgctgtacctgctgagcctgatgcagcccaagcccggcgcccccagactgcagcccccccccaaccagagaggcctgtgcagcctggccgccgacggcctgtggaaccagaagatcctgttcgaggagcaggacctgagaaagcacggcctggacggcgaggacgtgagcgccttcctgaacatgaacatcttccagaaggacatcaactgcgagagatactacagcttcatccacctgagcttccaggagttcttcgccgccatgtactacatcctggacgagggcgagggcggcgccggccccgaccaggacgtgaccagactgctgaccgagtacgccttcagcgagagaagcttcctggccctgaccagcagattcctgttcggcctgctgaacgaggagaccagaagccacctggagaagagcctgtgctggaaggtgagcccccacatcaagatggacctgctgcagtggatccagagcaaggcccagagcgacggcagcaccctgcagcagggcagcctggagttcttcagctgcctgtacgagatccaggaggaggagttcatccagcaggccctgagccacttccaggtgatcgtggtgagcaacatcgccagcaagatggagcacatggtgagcagcttctgcctgaagagatgcagaagcgcccaggtgctgcacctgtacggcgccacctacagcgccgacggcgaggacagagccagatgcagcgccggcgcccacaccctgctggtgcagctgcccgagagaaccgtgctgctggacgcctacagcgagcacctggccgccgccctgtgcaccaaccccaacctgatcgagctgagcctgtacagaaacgccctgggcagcagaggcgtgaagctgctgtgccagggcctgagacaccccaactgcaagctgcagaacctgagactgaagagatgcagaatcagcagcagcgcctgcgaggacctgagcgccgccctgatcgccaacaagaacctgaccagaatggacctgagcggcaacggcgtgggcttccccggcatgatgctgctgtgcgagggcctgagacacccccagtgcagactgcagatgatccagctgagaaagtgccagctggagagcggcgcctgccaggagatggccagcgtgctgggcaccaacccccacctggtggagctggacctgaccggcaacgccctggaggacctgggcctgagactgctgtgccagggcctgagacaccccgtgtgcagactgagaaccctgtggctgaagatctgcagactgaccgccgccgcctgcgacgagctggccagcaccctgagcgtgaaccagagcctgagagagctggacctgagcctgaacgagctgggcgacctgggcgtgctgctgctgtgcgagggcctgagacaccccacctgcaagctgcagaccctgagactgggcatctgcagactgggcagcgccgcctgcgagggcctgagcgtggtgctgcaggccaaccacaacctgagagagctggacctgagcttcaacgacctgggcgactggggcctgtggctgctggccgagggcctgcagcaccccgcctgcagactgcagaagctgtggctggacagctgcggcctgaccgccaaggcctgcgagaacctgtacttcaccctgggcatcaaccagaccctgaccgacctgtacctgaccaacaacgccctgggcgacaccggcgtgagactgctgtgcaagagactgagccaccccggctgcaagctgagagtgctgtggctgttcggcatggacctgaacaagatgacccacagcagactggccgccctgagagtgaccaagccctacctggacatcggctgctga

SEQ ID NO: 9045 - RNA, 3186 nt, synthetic construct
  misc_feature 1..3186: note = derived and/or modified sequence opt5 fromNALP12__Homo_sapiens__AAH28069
  source 1..3186: mol_type = other RNA
atgctgagaaccgccggccgggacgggctctgccgcctgagcacataccttgaggaactggaggctgtggaactcaagaaattcaagctgtatcttggaacggccaccgagctgggcgaagggaaaatcccctggggatccatggagaaggcgggccctctcgagatggctcagctgctgattacacactttgggccggaagaggcctggagactcgccctgtctaccttcgaacggatcaaccgcaaagatctttgggagagaggacaacgggaggacctggtccgcgatacaccccctggcggccccagctccctcgggaatcagtctacctgtctgcttgaagttagcctggtgacacctagaaaggacccccaggagacctaccgggattatgtgcgcagaaagtttcggctcatggaagaccgcaacgctagactgggagagtgcgtcaatctgtcccatcggtacacgcgcctcctgcttgtgaaagaacactctaaccctatgcaggttcaacagcagctgctcgataccggcagagggcatgcccggacagtgggacaccaggctagcccgattaagatcgagaccctgttcgagcccgacgaagagagacctgaaccccctcgcacagtcgtgatgcaaggcgccgcggggattggaaaatccatgcttgcccataaggttatgctggattgggctgacggcaaactctttcagggccggttcgattatctgttttacatcaattgtagagagatgaaccagagcgccaccgaatgctctatgcaggacctgatcttctcctgttggcccgagccgagcgctcctctccaagagctgattcgcgtgcccgaacggcttctgtttatcattgatgggttcgacgagctcaagccttcttttcacgacccccagggaccctggtgcctgtgttgggaagagaagagacctacggaacttctgctcaattccctgatccgcaaaaagctgctcccggagctgagccttctgattacaacccggcccacagccctcgagaaactgcacagactgcttgaacatcctcgccacgtcgagatcctcggcttctctgaagcggagcggaaggagtatttttacaaatacttccataacgccgaacaggctgggcaagtgttcaattatgtgagagataacgagcccctgtttaccatgtgcttcgtccctctggtttgttgggtggtgtgcacctgtctccagcagcagctggaaggaggcgggcttctgcgccaaacatcccggacgaccacagccgtctacatgctctatctgctgagccttatgcagcccaagccgggagctcctagactccagccccctcccaatcagcggggcctgtgctccctggccgccgacggcctctggaaccagaaaattctgtttgaggaacaagatcttcgcaagcacgggctggacggagaggatgtgtctgctttcctcaatatgaacatctttcagaaggacatcaattgcgagagatactatagcttcattcacctgtcctttcaggagttctttgcggccatgtactatatcctggatgaaggcgaagggggagctggccctgaccaagatgttacccggcttctcacagagtacgccttcagcgaaagatcttttctggccctgacctcccgcttcctctttgggctgcttaacgaggagacgcggagccatctggaaaaatctctctgttggaaggtgagcccccacattaaaatggacctgctgcagtggatccagtccaaggctcagtctgatggcagcacacttcaacagggatccctcgagttcttcagctgcctgtacgaaattcaggaggaagagtttatccaacaggccctgtctcatttccaggtcatcgtggtttccaacattgcgagcaaaatggagcacatggtgtcttccttttgtctcaagagatgccgcagcgctcaggtcctgcatctttatggcgccacctactccgccgacggggaagacagagctcggtgttctgccggagctcacaccctgctcgtgcaactgccggagcgcacagtcctgcttgatgcctatagcgaacacctggcggccgctctctgcaccaatcctaacctgatcgagctctccctgtacagaaatgcccttggctctcgcggggtgaagctgctctgtcagggactgcggcatcccaactgcaaactgcagaatcttagactgaagcggtgtcgcattagctccagcgcttgcgaggacctctctgccgcgctgatcgccaacaaaaatctcacaagaatggatctgtccggcaacggggttggcttccccggaatgatgcttctgtgtgaaggcctccggcaccctcagtgccgcctgcaaatgattcagctgagaaagtgccagcttgagagcggggcttgtcaggaaatggcctctgtgctgggaacgaatccgcatctcgtcgagctggacctcaccggcaacgctctggaagatcttgggctgcggctgctctgccaaggactgagacaccccgtgtgtcgccttcggacactgtggctcaaaatctgcagactgaccgccgccgcttgtgacgagctcgcgtccacactgagcgttaatcagtctcttcgcgagctggatctgagcctcaacgaactgggcgaccttggggtgctgctcctgtgcgagggcctccggcaccctacctgtaagctgcagacgcttagactgggaatctgccgcctgggctccgccgcttgtgaagggctcagcgtcgtgctgcaagccaatcataaccttcgggagctggatctctcttttaatgacctgggagattggggcctctggctgcttgccgaagggctgcagcaccccgcttgcagactgcagaagctctggctggactcctgtggacttaccgccaaagcgtgcgagaacctgtatttcacactcggcattaaccagaccctgacagatctgtacctcaccaataacgctcttggggacacgggcgtgcgcctgctgtgcaagcggctcagccatcctggatgtaaactgagagttctttggctgtttggcatggacctcaataagatgacacactcccggctggccgccctgcgcgtcaccaaaccctatctcgatatcgggtgctga

SEQ ID NO: 9046 - protein, 1043 aa, synthetic construct
  REGION 1..1043: note = NALP13__Homo_sapiens__Q86W25
MNFSVITCPNGGTNQGLLPYLMALDQYQLEEFKLCLEPQQLMDFWSAPQGHFPRIPWANLRAADPLNLSFLLDEHFPKGQAWKVVLGIFQTMNLTSLCEKVRAEMKENVQTQELQDPTQEDLEMLEAAAGNMQTQGCQDPNQEELDELEEETGNVQAQGCQDPNQEEPEMLEEADHRRKYRENMKAELLETWDNISWPKDHVYIRNTSKDEHEELQRLLDPNRTRAQAQTIVLVGRAGVGKTTLAMQAMLHWANGVLFQQRFSYVFYLSCHKIRYMKETTFAELISLDWPDFDAPIEEFMSQPEKLLFIIDGFEEIIISESRSESLDDGSPCTDWYQELPVTKILHSLLKKELVPLATLLITIKTWFVRDLKASLVNPCFVQITGFTGDDLRVYFMRHFDDSSEVEKILQQLRKNETLFHSCSAPMVCWTVCSCLKQPKVRYYDLQSITQTTTSLYAYFFSNLFSTAEVDLADDSWPGQWRALCSLAIEGLWSMNFTFNKEDTEIEGLEVPFIDSLYEFNILQKINDCGGCTTFTHLSFQEFFAAMSFVLEEPREFPPHSTKPQEMKMLLQHVLLDKEAYWTPVVLFFFGLLNKNIARELEDTLHCKISPRVMEELLKWGEELGKAESASLQFHILRLFHCLHESQEEDFTKKMLGRIFEVDLNILEDEELQASSFCLKHCKRLNKLRLSVSSHILERDLEILETSKFDSRMHAWNSICSTLVTNENLHELDLSNSKLHASSVKGLCLALKNPRCKVQKLTCKSVTPEWVLQDLIIALQGNSKLTHLNFSSNKLGMTVPLILKALRHSACNLKYLCLEKCNLSAASCQDLALFLTSIQHVTRLCLGFNRLQDDGIKLLCAALTHPKCALERLELWFCQLAAPACKHLSDALLQNRSLTHLNLSKNSLRDEGVKFLCEALGRPDGNLQSLNLSGCSFTREGCGELANALSHNHNVKILDLGENDLQDDGVKLLCEALKPHRALHTLGLAKCNLTTACCQHLFSVLSSSKSLVNLNLLGNELDTDGVKMLCKALKKSTCRLQKLG

SEQ ID NO: 9047 - RNA, 3132 nt, synthetic construct
  misc_feature 1..3132: note = NALP13__Homo_sapiens__CCDS33119.1
  source 1..3132: mol_type = other RNA
atgaacttttctgtaatcacctgccccaacggtggtaccaaccaagggcttctgccttacctgatggccctggatcagtatcagctggaggaattcaagctttgcttggaaccccagcagctgatggacttctggtcggccccccaggggcacttcccgcgtatcccctgggcaaacttgagagctgccgaccctttgaatctgtcctttcttttggatgaacacttcccaaaaggtcaggcatggaaagtggtcctcggcatcttccagacaatgaatctgacctcactgtgtgagaaagttagagccgagatgaaagagaatgtgcagacccaagagctgcaagatccaacccaggaagatctagagatgctagaagcagcagcagggaatatgcagacccagggatgccaagatccaaaccaagaagaactagacgagctagaagaagaaacagggaatgtacaggcccagggatgccaagatccaaaccaagaagaaccagagatgctagaggaagcagaccacagaagaaaatacagagagaacatgaaggctgaactactggagacatgggacaacatcagttggcctaaagaccacgtatatatccgtaatacatcaaaggacgaacatgaggaactgcagcgcctactggatcctaataggactagagcccaggcccagacgatagtcttggtggggagggcaggggttgggaagaccaccttggcaatgcaggctatgctgcactgggcaaatggagttctctttcagcaaaggttctcctatgttttctatctcagctgccataaaataaggtacatgaaggaaactacctttgctgaattgatttctttggattggcccgattttgatgcccccattgaagagttcatgtctcaaccagagaagctcctgtttattattgatggctttgaggaaataatcatatctgagtcacgctctgagagcttggatgatggctcgccatgtacagactggtaccaggagctcccagtgaccaaaatcctacacagcttgttgaagaaagaattggttcccctggctaccttactgatcacgatcaagacctggtttgtgagagatcttaaggcctcattagtgaatccatgctttgtacaaattacagggttcacaggggacgacctacgggtatatttcatgagacactttgatgactcaagtgaagttgagaaaatcctgcagcagctaagaaaaaacgaaactctctttcattcctgcagtgcccccatggtgtgttggaccgtatgttcctgtctgaagcagccgaaggtgaggtattacgatctccagtcaatcactcagactaccaccagtctgtatgcctattttttctccaacttgttctccacagcagaggtagatttggcagatgacagctggccaggacaatggagggccctctgcagtctggccatagaagggctgtggtctatgaacttcacgtttaacaaagaagacactgagatcgagggcctggaagtgcctttcattgattctctctacgagttcaatattcttcaaaagatcaatgactgtgggggttgcactactttcacccacctaagtttccaggagttttttgcagccatgtcctttgtgctagaggaacctagagaattccctccccattccacaaagccacaagagatgaagatgttactgcaacacgtcttgcttgacaaagaagcctactggactccagtggttctgttcttctttggtcttttaaataaaaacatagcaagagaactggaagatactttgcattgtaaaatatctcccagggtaatggaggaattattaaagtggggagaagagttaggtaaggctgaaagtgcctctctccaatttcacattctacgactttttcactgcctacacgagtcccaggaggaagacttcacaaagaagatgttgggtcgtatctttgaagttgaccttaatattttggaggacgaagaactccaagcttcttcattttgcctaaagcactgtaaaaggttaaataagctaaggctttctgttagcagtcacatccttgaaagggacttggaaattctggagacaagcaagtttgattccaggatgcacgcatggaacagcatttgctctacgttggtcacaaatgagaatctgcatgagctagacctgagtaacagcaaacttcatgcttcctctgtgaagggtctctgtcttgcactgaaaaatccaagatgcaaagtccagaaactgacgtgcaaatcggtaactcctgagtgggttctgcaggacctcattattgcccttcagggtaacagcaagctgacccatctgaacttcagctctaacaagctgggaatgactgtccccctgattcttaaagctttgagacactcagcttgcaacctcaagtatctgtgcctggagaaatgcaacttgtcggcagccagctgtcaggacctagccttgtttctcaccagcatccaacacgtaactcgattgtgcctgggatttaatcggctccaagatgatggcataaagctattgtgtgcggccctgactcaccccaagtgtgccttagagagactggagctctggttttgccagctggcagcacccgcttgcaagcacttgtcagatgctctcctgcagaacaggagcctgacacacctgaatctgagcaagaacagcctgagagacgagggagtcaagttcctgtgtgaggccttgggtcgcccagatggtaacctgcagagcctgaatttgtcaggttgttctttcacaagagagggctgtggagagctggctaatgccctcagccataatcataatgtgaaaatcttggatttgggagaaaatgatcttcaggatgatggagtgaagctactgtgtgaggctctgaaaccacatcgtgcattgcacacacttgggttggcgaaatgcaatctgacaactgcttgctgccagcatctcttctctgttctcagcagcagtaagagcctggtcaatctgaaccttctaggcaatgaattggatactgatggtgtcaagatgctatgtaaggctttgaaaaagtcgacatgcaggctgcagaaactcgggtaa

SEQ ID NO: 9048 - RNA, 3132 nt, synthetic construct
  misc_feature 1..3132: note = derived and/or modified sequence opt1 fromNALP13__Homo_sapiens__CCDS33119.1
  source 1..3132: mol_type = other RNA
atgaacttcagcgtgatcacgtgccccaacggcgggaccaaccagggcctgctcccgtacctgatggccctggaccagtaccagctcgaggagttcaagctgtgcctggagccccagcagctcatggacttctggagcgcgccccaggggcacttcccccgcatcccgtgggccaacctgcgggccgccgaccccctgaacctcagcttcctgctggacgagcacttccccaagggccaggcctggaaggtcgtgctcgggatcttccagaccatgaacctgacctccctgtgcgagaaggtgcgcgccgagatgaaggagaacgtccagacccaggagctccaggaccccacccaggaggacctggagatgctggaggcggccgccggcaacatgcagacgcagggctgccaggacccgaaccaggaggagctcgacgagctggaggaggagaccgggaacgtgcaggcccagggctgccaggaccccaaccaggaggagcccgagatgctggaggaggcggaccaccggcgcaagtaccgggagaacatgaaggccgagctcctggagacctgggacaacatcagctggcccaaggaccacgtgtacatccgcaacacctccaaggacgagcacgaggagctgcagcggctcctggacccgaaccgcacgcgggcccaggcccagaccatcgtcctggtggggcgcgccggcgtggggaagaccaccctcgcgatgcaggccatgctgcactgggccaacggcgtcctgttccagcagcggttcagctacgtgttctacctctcctgccacaagatccgctacatgaaggagacgaccttcgccgagctgatcagcctggactggcccgacttcgacgcccccatcgaggagttcatgtcccagcccgagaagctcctgttcatcatcgacggcttcgaggagatcatcatcagcgagtcccggagcgagtccctggacgacgggagcccgtgcaccgactggtaccaggagctccccgtgaccaagatcctgcactccctgctcaagaaggagctggtccccctggcgacgctcctgatcaccatcaagacctggttcgtgcgcgacctgaaggccagcctcgtgaacccctgcttcgtccagatcaccggcttcacgggggacgacctgcgggtgtacttcatgcgccacttcgacgactccagcgaggtggagaagatcctgcagcagctccggaagaacgagaccctgttccactcctgcagcgccccgatggtctgctggaccgtgtgcagctgcctgaagcagcccaaggtgcgctactacgacctgcagtccatcacccagacgaccaccagcctctacgcctacttcttctccaacctgttcagcaccgccgaggtcgacctggcggacgactcctggcccggccagtggcgggccctctgcagcctggccatcgagggcctgtggtccatgaacttcacgttcaacaaggaggacaccgagatcgaggggctcgaggtgcccttcatcgacagcctgtacgagttcaacatcctgcagaagatcaacgactgcggcgggtgcaccaccttcacgcacctctccttccaggagttcttcgccgccatgagcttcgtgctggaggagccgcgcgagttcccgccccactccaccaagccccaggagatgaagatgctgctccagcacgtcctgctggacaaggaggcgtactggacccccgtggtcctcttcttcttcggcctgctgaacaagaacatcgcccgggagctcgaggacaccctgcactgcaagatcagcccccgcgtgatggaggagctgctcaagtggggcgaggagctggggaaggccgagtccgccagcctgcagttccacatcctccgcctgttccactgcctgcacgagtcccaggaggaggacttcacgaagaagatgctcggccggatcttcgaggtggacctgaacatcctggaggacgaggagctccaggcgagctccttctgcctgaagcactgcaagcgcctgaacaagctccggctgagcgtctccagccacatcctggagcgcgacctcgagatcctggagaccagcaagttcgactcccggatgcacgcctggaacagcatctgctccaccctggtgaccaacgagaacctccacgagctggacctgagcaactccaagctccacgccagctccgtgaaggggctgtgcctggccctcaagaacccccgctgcaaggtccagaagctgacctgcaagagcgtgacgccggagtgggtgctgcaggacctcatcatcgccctgcagggcaactccaagctgacccacctcaacttcagctccaacaagctggggatgaccgtccccctgatcctcaaggcgctgcggcacagcgcctgcaacctgaagtacctctgcctggagaagtgcaacctgtccgccgccagctgccaggacctcgccctgttcctgacctccatccagcacgtgacgcgcctctgcctgggcttcaaccggctgcaggacgacgggatcaagctcctgtgcgcggccctgacccaccccaagtgcgccctcgagcgcctggagctgtggttctgccagctcgccgcccccgcgtgcaagcacctgagcgacgccctgctccagaaccggtccctgacccacctgaacctcagcaagaacagcctgcgcgacgagggcgtgaagttcctgtgcgaggccctcggccggccggacgggaacctgcagtccctgaacctcagcggctgctccttcacccgcgaggggtgcggcgagctggccaacgcgctgagccacaaccacaacgtcaagatcctcgacctgggggagaacgacctgcaggacgacggcgtgaagctcctgtgcgaggccctgaagccccaccgggccctccacacgctgggcctggccaagtgcaacctgaccaccgcctgctgccagcacctcttctccgtgctgagctccagcaagtccctggtcaacctcaacctgctggggaacgagctcgacaccgacggcgtgaagatgctgtgcaaggcgctgaagaagtccacgtgccgcctccagaagctggggtga

SEQ ID NO: 9049 - RNA, 3132 nt, synthetic construct
  misc_feature 1..3132: note = derived and/or modified sequence opt2 fromNALP13__Homo_sapiens__CCDS33119.1
  source 1..3132: mol_type = other RNA
atgaacttctccgtcatcacctgccccaacggcggcaccaaccagggcctcctcccctacctcatggccctcgaccagtaccagctcgaggagttcaagctctgcctcgagccccagcagctcatggacttctggtccgccccccagggccacttcccccgcatcccctgggccaacctccgcgccgccgaccccctcaacctctccttcctcctcgacgagcacttccccaagggccaggcctggaaggtcgtcctcggcatcttccagaccatgaacctcacctccctctgcgagaaggtccgcgccgagatgaaggagaacgtccagacccaggagctccaggaccccacccaggaggacctcgagatgctcgaggccgccgccggcaacatgcagacccagggctgccaggaccccaaccaggaggagctcgacgagctcgaggaggagaccggcaacgtccaggcccagggctgccaggaccccaaccaggaggagcccgagatgctcgaggaggccgaccaccgccgcaagtaccgcgagaacatgaaggccgagctcctcgagacctgggacaacatctcctggcccaaggaccacgtctacatccgcaacacctccaaggacgagcacgaggagctccagcgcctcctcgaccccaaccgcacccgcgcccaggcccagaccatcgtcctcgtcggccgcgccggcgtcggcaagaccaccctcgccatgcaggccatgctccactgggccaacggcgtcctcttccagcagcgcttctcctacgtcttctacctctcctgccacaagatccgctacatgaaggagaccaccttcgccgagctcatctccctcgactggcccgacttcgacgcccccatcgaggagttcatgtcccagcccgagaagctcctcttcatcatcgacggcttcgaggagatcatcatctccgagtcccgctccgagtccctcgacgacggctccccctgcaccgactggtaccaggagctccccgtcaccaagatcctccactccctcctcaagaaggagctcgtccccctcgccaccctcctcatcaccatcaagacctggttcgtccgcgacctcaaggcctccctcgtcaacccctgcttcgtccagatcaccggcttcaccggcgacgacctccgcgtctacttcatgcgccacttcgacgactcctccgaggtcgagaagatcctccagcagctccgcaagaacgagaccctcttccactcctgctccgcccccatggtctgctggaccgtctgctcctgcctcaagcagcccaaggtccgctactacgacctccagtccatcacccagaccaccacctccctctacgcctacttcttctccaacctcttctccaccgccgaggtcgacctcgccgacgactcctggcccggccagtggcgcgccctctgctccctcgccatcgagggcctctggtccatgaacttcaccttcaacaaggaggacaccgagatcgagggcctcgaggtccccttcatcgactccctctacgagttcaacatcctccagaagatcaacgactgcggcggctgcaccaccttcacccacctctccttccaggagttcttcgccgccatgtccttcgtcctcgaggagccccgcgagttccccccccactccaccaagccccaggagatgaagatgctcctccagcacgtcctcctcgacaaggaggcctactggacccccgtcgtcctcttcttcttcggcctcctcaacaagaacatcgcccgcgagctcgaggacaccctccactgcaagatctccccccgcgtcatggaggagctcctcaagtggggcgaggagctcggcaaggccgagtccgcctccctccagttccacatcctccgcctcttccactgcctccacgagtcccaggaggaggacttcaccaagaagatgctcggccgcatcttcgaggtcgacctcaacatcctcgaggacgaggagctccaggcctcctccttctgcctcaagcactgcaagcgcctcaacaagctccgcctctccgtctcctcccacatcctcgagcgcgacctcgagatcctcgagacctccaagttcgactcccgcatgcacgcctggaactccatctgctccaccctcgtcaccaacgagaacctccacgagctcgacctctccaactccaagctccacgcctcctccgtcaagggcctctgcctcgccctcaagaacccccgctgcaaggtccagaagctcacctgcaagtccgtcacccccgagtgggtcctccaggacctcatcatcgccctccagggcaactccaagctcacccacctcaacttctcctccaacaagctcggcatgaccgtccccctcatcctcaaggccctccgccactccgcctgcaacctcaagtacctctgcctcgagaagtgcaacctctccgccgcctcctgccaggacctcgccctcttcctcacctccatccagcacgtcacccgcctctgcctcggcttcaaccgcctccaggacgacggcatcaagctcctctgcgccgccctcacccaccccaagtgcgccctcgagcgcctcgagctctggttctgccagctcgccgcccccgcctgcaagcacctctccgacgccctcctccagaaccgctccctcacccacctcaacctctccaagaactccctccgcgacgagggcgtcaagttcctctgcgaggccctcggccgccccgacggcaacctccagtccctcaacctctccggctgctccttcacccgcgagggctgcggcgagctcgccaacgccctctcccacaaccacaacgtcaagatcctcgacctcggcgagaacgacctccaggacgacggcgtcaagctcctctgcgaggccctcaagccccaccgcgccctccacaccctcggcctcgccaagtgcaacctcaccaccgcctgctgccagcacctcttctccgtcctctcctcctccaagtccctcgtcaacctcaacctcctcggcaacgagctcgacaccgacggcgtcaagatgctctgcaaggccctcaagaagtccacctgccgcctccagaagctcggctga

SEQ ID NO: 9050 - RNA, 3132 nt, synthetic construct
  misc_feature 1..3132: note = derived and/or modified sequence opt3 fromNALP13__Homo_sapiens__CCDS33119.1
  source 1..3132: mol_type = other RNA
atgaacttcagcgtgattacctgccccaatggcgggacaaaccagggactgctcccttaccttatggccctggaccaatatcagttggaggaatttaagttatgtctggagccacagcagctaatggatttctggtccgctccgcaaggtcactttcccagaatcccttgggcaaatctcagggccgcggacccactgaacctttctttcctgttggatgaacattttcccaaaggccaggcttggaaggtcgttctcgggatattccagactatgaatctgacgtcactgtgcgagaaagtgcgggccgaaatgaaggagaacgtacagacccaagagctccaggaccctacacaggaagatttagagatgctggaagcagccgctggaaatatgcagactcaaggctgtcaggacccaaaccaggaggagcttgatgaattggaggaagagaccggtaatgtgcaagcacaggggtgccaggaccccaaccaggaagaacctgagatgctggaagaggccgatcaccgccgaaaataccgtgaaaatatgaaggctgagctactcgaaacatgggacaacatcagttggccaaaggatcatgtctatattagaaataccagcaaagacgagcacgaggaactgcaaaggcttctggatccgaaccggactcgcgcccaggcgcagacaatcgtgttggttggcagagcaggagtgggcaagaccacgctcgccatgcaggctatgctgcattgggccaatggggtcttatttcaacagaggttctcctacgtgttttatctgtcttgtcacaaaattcggtacatgaaggagactaccttcgcagaactcatctcgcttgactggcccgactttgatgctcctatagaggagttcatgtcacagccagagaaactgttgtttatcattgacggattcgaggaaatcattatcagcgagagtcgctccgaatctctagatgacggtagcccctgcacagattggtatcaggagctgcctgtaactaagatactccactccctgcttaagaaagagctggttccattggccaccctcctgattacaatcaagacctggttcgtgcgagacttaaaagcgtcactggtcaacccctgttttgtgcaaattacgggcttcactggggatgacctaagagtgtactttatgaggcatttcgatgacagtagcgaagtcgagaagatcctccagcagctgcggaaaaacgaaacactttttcactcttgctccgccccgatggtttgttggaccgtgtgctcatgtttgaagcagcctaaagtacgttactatgatctgcaaagcatcactcagacaaccacgagtctctacgcatatttcttttctaatctgttctccaccgctgaggtggaccttgccgacgatagctggcccggacagtggcgcgctctgtgctcgttggccattgaaggcctctggtctatgaactttacattcaataaggaggacactgagatagaaggtctggaggtcccatttatcgattccttatacgagttcaacattctgcaaaagatcaatgactgcgggggatgtaccacatttactcatctatcattccaggagttctttgcagccatgagtttcgtgctcgaagaacctagagagtttcccccacacagcaccaaaccccaggaaatgaagatgctgcttcagcacgttttgctggataaagaggcttattggacacctgtggtcctcttctttttcggcctgttaaacaagaatatagcgagggaactggaggacacccttcattgcaaaatttccccacgggtgatggaagagttgctcaagtggggcgaggaactggggaaggcagagtctgccagcctacaatttcacatcctgcgactcttccattgtctgcacgaatcacaggaggaggattttactaaaaagatgcttggacgcatcttcgaagtagacttgaacattctggaggatgaagagttacaggctagttccttttgcctcaaacattgtaagagactgaataaacttaggctgagcgtttcttcacacatcttggaacgggacctcgagattctggagacgagtaagttcgatagccgcatgcacgcctggaactccatatgctctacacttgtgaccaatgaaaacctgcatgagctcgacctgtcgaatagcaagctacacgcatcctcagtcaaaggtttgtgtctggccttaaagaacccgagatgcaaagtgcagaagctcacttgtaaaagtgtcacccccgaatgggtgctgcaagatcttatcattgctctgcagggcaattctaagctaacacatctcaactttagctccaacaagctggggatgaccgttcctttgatcctgaaagccttaaggcactcagcatgcaatctcaagtacctgtgtcttgagaaatgcaacctgagcgcggcttcttgccaggacttggccctcttcctgacttccatccagcacgtgacacgtctatgtctgggattcaatcggcttcaagacgatggcattaagctcctgtgcgcagccttgacgcatccaaaatgtgctctggaacgattagagctctggttttgccagctggccgcacccgcttgtaagcaccttagtgacgccctgttgcagaacagaagcctcacccatctgaatctatctaaaaactccctgagggatgagggtgtaaagttcctttgcgaagcgctcgggcgccctgacggcaatctgcaatcattgaacttaagtggatgtagctttactcgggagggctgcggggaactggccaatgctctctcgcacaaccataatgtcaagatactggatcttggagagaacgacctgcaggatgacggtgtgaaattgctatgtgaagcactgaagccacacagagccctccacacactgggccttgctaaatgcaatttaaccacagcctgttgccagcatctgttctccgttctctctagctcaaagagtttggtgaacctgaatctcctggggaacgagcttgatactgacggagtcaaaatgctgtgcaaggcattgaagaaatccacctgtaggctacagaagctgggctga

SEQ ID NO: 9051 - RNA, 3132 nt, synthetic construct
  misc_feature 1..3132: note = derived and/or modified sequence opt4 fromNALP13__Homo_sapiens__CCDS33119.1
  source 1..3132: mol_type = other RNA
atgaacttcagcgtgatcacctgccccaacggcggcaccaaccagggcctgctgccctacctgatggccctggaccagtaccagctggaggagttcaagctgtgcctggagccccagcagctgatggacttctggagcgccccccagggccacttccccagaatcccctgggccaacctgagagccgccgaccccctgaacctgagcttcctgctggacgagcacttccccaagggccaggcctggaaggtggtgctgggcatcttccagaccatgaacctgaccagcctgtgcgagaaggtgagagccgagatgaaggagaacgtgcagacccaggagctgcaggaccccacccaggaggacctggagatgctggaggccgccgccggcaacatgcagacccagggctgccaggaccccaaccaggaggagctggacgagctggaggaggagaccggcaacgtgcaggcccagggctgccaggaccccaaccaggaggagcccgagatgctggaggaggccgaccacagaagaaagtacagagagaacatgaaggccgagctgctggagacctgggacaacatcagctggcccaaggaccacgtgtacatcagaaacaccagcaaggacgagcacgaggagctgcagagactgctggaccccaacagaaccagagcccaggcccagaccatcgtgctggtgggcagagccggcgtgggcaagaccaccctggccatgcaggccatgctgcactgggccaacggcgtgctgttccagcagagattcagctacgtgttctacctgagctgccacaagatcagatacatgaaggagaccaccttcgccgagctgatcagcctggactggcccgacttcgacgcccccatcgaggagttcatgagccagcccgagaagctgctgttcatcatcgacggcttcgaggagatcatcatcagcgagagcagaagcgagagcctggacgacggcagcccctgcaccgactggtaccaggagctgcccgtgaccaagatcctgcacagcctgctgaagaaggagctggtgcccctggccaccctgctgatcaccatcaagacctggttcgtgagagacctgaaggccagcctggtgaacccctgcttcgtgcagatcaccggcttcaccggcgacgacctgagagtgtacttcatgagacacttcgacgacagcagcgaggtggagaagatcctgcagcagctgagaaagaacgagaccctgttccacagctgcagcgcccccatggtgtgctggaccgtgtgcagctgcctgaagcagcccaaggtgagatactacgacctgcagagcatcacccagaccaccaccagcctgtacgcctacttcttcagcaacctgttcagcaccgccgaggtggacctggccgacgacagctggcccggccagtggagagccctgtgcagcctggccatcgagggcctgtggagcatgaacttcaccttcaacaaggaggacaccgagatcgagggcctggaggtgcccttcatcgacagcctgtacgagttcaacatcctgcagaagatcaacgactgcggcggctgcaccaccttcacccacctgagcttccaggagttcttcgccgccatgagcttcgtgctggaggagcccagagagttccccccccacagcaccaagccccaggagatgaagatgctgctgcagcacgtgctgctggacaaggaggcctactggacccccgtggtgctgttcttcttcggcctgctgaacaagaacatcgccagagagctggaggacaccctgcactgcaagatcagccccagagtgatggaggagctgctgaagtggggcgaggagctgggcaaggccgagagcgccagcctgcagttccacatcctgagactgttccactgcctgcacgagagccaggaggaggacttcaccaagaagatgctgggcagaatcttcgaggtggacctgaacatcctggaggacgaggagctgcaggccagcagcttctgcctgaagcactgcaagagactgaacaagctgagactgagcgtgagcagccacatcctggagagagacctggagatcctggagaccagcaagttcgacagcagaatgcacgcctggaacagcatctgcagcaccctggtgaccaacgagaacctgcacgagctggacctgagcaacagcaagctgcacgccagcagcgtgaagggcctgtgcctggccctgaagaaccccagatgcaaggtgcagaagctgacctgcaagagcgtgacccccgagtgggtgctgcaggacctgatcatcgccctgcagggcaacagcaagctgacccacctgaacttcagcagcaacaagctgggcatgaccgtgcccctgatcctgaaggccctgagacacagcgcctgcaacctgaagtacctgtgcctggagaagtgcaacctgagcgccgccagctgccaggacctggccctgttcctgaccagcatccagcacgtgaccagactgtgcctgggcttcaacagactgcaggacgacggcatcaagctgctgtgcgccgccctgacccaccccaagtgcgccctggagagactggagctgtggttctgccagctggccgcccccgcctgcaagcacctgagcgacgccctgctgcagaacagaagcctgacccacctgaacctgagcaagaacagcctgagagacgagggcgtgaagttcctgtgcgaggccctgggcagacccgacggcaacctgcagagcctgaacctgagcggctgcagcttcaccagagagggctgcggcgagctggccaacgccctgagccacaaccacaacgtgaagatcctggacctgggcgagaacgacctgcaggacgacggcgtgaagctgctgtgcgaggccctgaagccccacagagccctgcacaccctgggcctggccaagtgcaacctgaccaccgcctgctgccagcacctgttcagcgtgctgagcagcagcaagagcctggtgaacctgaacctgctgggcaacgagctggacaccgacggcgtgaagatgctgtgcaaggccctgaagaagagcacctgcagactgcagaagctgggctga

SEQ ID NO: 9052 - RNA, 3132 nt, synthetic construct
  misc_feature 1..3132: note = derived and/or modified sequence opt5 fromNALP13__Homo_sapiens__CCDS33119.1
  source 1..3132: mol_type = other RNA
atgaacttcagcgtgattacctgccccaatggcgggacaaaccagggactgctcccttacctgatggcccttgaccaatatcagctggaggaatttaagctctgtctggagccgcagcagcttatggatttctggtccgctccccaaggccactttcctagaatcccctgggccaatctgcgggcggctgaccctctcaacctgtctttcctgctcgatgaacattttcccaaagggcaggcctggaaggtcgttctgggaatcttccagacgatgaatcttaccagcctgtgcgagaaagtgcgcgccgaaatgaaggagaacgtgcagacacaagagctccaggaccctacccaggaagatctggagatgcttgaagctgccgctggcaatatgcagacacaagggtgtcaggacccgaaccaggaggagctggatgaactcgaggaagagaccggaaatgtccaagcccagggctgccaggaccccaaccaggaagaacctgagatgctggaagaggcggatcacagacggaaataccgcgaaaatatgaaggccgagctgctcgaaacatgggacaacatttcctggcccaaggatcatgtgtatatcagaaatacctctaaagacgagcacgaggaactgcaacggcttctggatcctaaccgcacgagagctcaggcccagaccattgttctcgtgggccgggctggggtcggaaagacaaccctggccatgcaggcgatgcttcattgggccaatggcgtgctgtttcaacagcgcttcagctacgttttctatctctcctgtcacaaaatcagatacatgaaggagacaaccttcgctgaactgatctctctggactggcccgactttgatgccccgattgaggaatttatgagccagcctgagaaactcctgtttatcattgacgggttcgaggaaatcattatctccgagagccggtctgaatcccttgatgacggaagcccctgcacggattggtatcaggagctgcctgtgacaaagattctccactctctgcttaagaaagagctggtccccctcgctaccctgctgatcacaatcaagacctggttcgtgcgcgacctcaaagcctccctggtgaacccctgttttgtccaaattaccggcttcacaggggatgaccttagagtttactttatgcggcatttcgatgacagctctgaagtggagaagatcctgcagcagctccgcaaaaacgaaacgctgtttcactcctgcagcgcccctatggtgtgttggaccgtctgctcctgtctgaagcagccgaaagtgagatactatgatcttcaatctattacacagaccacaaccagcctctacgcttatttcttttccaatctgttcagcacggcggaggttgacctggccgacgattcttggcccggacagtggcgggctctctgctccctggccatcgaaggcctttggagcatgaactttacattcaataaggaggacaccgagattgaaggcctggaggtgccttttatcgattctctctacgagttcaacatcctgcaaaagattaatgactgcgggggatgtaccacatttacccatctgagcttccaggagttctttgccgctatgtccttcgtccttgaagaacccagagagtttcctccccactctacaaaaccgcaggaaatgaagatgctcctgcagcacgtgctgctcgataaagaggcctattggacgcctgttgtgctgttctttttcggccttctgaacaagaatatcgcgcgcgaactcgaggacaccctgcattgcaaaattagcccccgggtcatggaggagctgcttaagtggggagaggaactcgggaaggctgagtccgccagcctgcaatttcacatcctgagactcttccattgtctgcacgaatctcaggaggaggattttaccaaaaagatgcttggccgcattttcgaagtggacctgaacatcctcgaggatgaggaactgcaggcctccagcttttgcctgaaacattgtaagcggcttaataaactcagactgtctgtctccagccacatcctggaacgcgacctcgagattctggagacatccaagttcgattctcggatgcacgcttggaacagcatctgctccacacttgtgaccaatgaaaacctgcatgagctcgacctgtctaatagcaagctgcacgcctccagcgttaaagggctttgtctggctctcaagaaccctagatgcaaagtgcagaagctgacgtgtaaatctgtcacccccgaatgggtgctccaagatctgattatcgcccttcagggaaattccaagctgacacatctcaactttagctctaacaagctgggcatgaccgttcctctgattcttaaagcgctgcgccactccgcctgcaatctcaagtacctgtgtctcgagaaatgcaacctgagcgctgcctcttgccaggaccttgctctgttcctcacaagcatccagcacgtgacccggctgtgtctgggcttcaatagacttcaagacgatgggattaagctgctctgcgccgcgctgacgcatcccaaatgtgccctcgaacgcctggagctttggttttgccagctggctgccccggcttgtaagcacctgtccgacgccctcctgcagaaccggagccttacacatctgaatctctctaaaaactccctgagagatgagggagtcaagttcctctgcgaagccctgggccggcctgacgggaatcttcaaagcctgaacctgtccggatgttcttttacccgcgagggctgcggggaactcgctaatgcgctgagccacaaccataatgtgaagatccttgatctgggcgagaacgacctccaggatgacggagtgaaactgctctgtgaagccctgaagccccacagagcccttcacacactgggcctggctaaatgcaatctcaccaccgcctgttgccagcatctgttctccgttctttctagctccaagtctctggtcaacctcaatctgctcgggaacgagctggatacagacggagtgaaaatgctttgcaaggctctgaagaaaagcacgtgtcggctgcagaagctcggctga

SEQ ID NO: 9053 - protein, 197 aa, synthetic construct
  REGION 1..197: note = NALP2__Homo_sapiens__Q8WY49
MSPLSLSVSNPRLKSQRCITAVRTHRFGFAFFLWLISRLWNCDITSDGCCDLTKLLQEKSSLLCLDLGLNHIGVKGMKFLCEALRKPLCNLRCLWLWGCSIPPFSCEDLCSALSCNQSLVTLDLGQNPLGSSGVKMLFETLTCSSGTLRTLRLKIDDFNDELNKLLEEIEEKNPQLIIDTEKHHPWAERPSSHDFMI

SEQ ID NO: 9054 - RNA, 594 nt, synthetic construct
  misc_feature 1..594: note = NALP2__Homo_sapiens__AAG23171
  source 1..594: mol_type = other RNA
atgtcaccactgtctctaagtgtgtctaacccacggctcaagagtcaaaggtgcatcacagcagtgagaactcacaggttcgggtttgctttcttcctgtggttgatttctaggctttggaactgcgacataactagcgatggctgctgcgatctcacaaagcttctccaagaaaaatcaagcctgttgtgtttggatctggggctgaatcacataggagttaagggaatgaagttcctgtgtgaggctttgaggaaaccactgtgcaacttgagatgtctgtggttgtggggatgttccatccctccgttcagttgtgaagacctctgctctgccctcagctgcaaccagagcctcgtcactctggacctgggtcagaatcccttggggtctagtggagtgaagatgctgtttgaaaccttgacatgttccagtggcaccctccggacactcaggttgaaaatagatgactttaatgatgaactcaataagctgctggaagaaatagaagaaaaaaacccacaactgattattgatactgagaaacatcatccctgggcagaaaggccttcttctcatgacttcatgatctga

SEQ ID NO: 9055 - RNA, 594 nt, synthetic construct
  misc_feature 1..594: note = derived and/or modified sequence opt1 fromNALP2__Homo_sapiens__AAG23171
  source 1..594: mol_type = other RNA
atgagccccctgtccctcagcgtgtccaacccgcgcctcaagagccagcggtgcatcaccgccgtccgcacccaccggttcggcttcgccttcttcctgtggctgatctcccgcctgtggaactgcgacatcacgagcgacgggtgctgcgacctgaccaagctcctgcaggagaagtccagcctgctctgcctggacctgggcctcaaccacatcggggtgaagggcatgaagttcctgtgcgaggcgctgcggaagcccctctgcaacctgcgctgcctgtggctctgggggtgctccatcccgcccttcagctgcgaggacctgtgctccgccctgagctgcaaccagtccctcgtgaccctggacctgggccagaaccccctcggcagctccggggtcaagatgctgttcgagaccctgacgtgcagctccggcaccctccggaccctgcgcctgaagatcgacgacttcaacgacgagctcaacaagctgctggaggagatcgaggagaagaacccccagctcatcatcgacaccgagaagcaccacccctgggccgagcggcccagctcccacgacttcatgatctga

SEQ ID NO: 9056 - RNA, 594 nt, synthetic construct
  misc_feature 1..594: note = derived and/or modified sequence opt2 fromNALP2__Homo_sapiens__AAG23171
  source 1..594: mol_type = other RNA
atgtcccccctctccctctccgtctccaacccccgcctcaagtcccagcgctgcatcaccgccgtccgcacccaccgcttcggcttcgccttcttcctctggctcatctcccgcctctggaactgcgacatcacctccgacggctgctgcgacctcaccaagctcctccaggagaagtcctccctcctctgcctcgacctcggcctcaaccacatcggcgtcaagggcatgaagttcctctgcgaggccctccgcaagcccctctgcaacctccgctgcctctggctctggggctgctccatcccccccttctcctgcgaggacctctgctccgccctctcctgcaaccagtccctcgtcaccctcgacctcggccagaaccccctcggctcctccggcgtcaagatgctcttcgagaccctcacctgctcctccggcaccctccgcaccctccgcctcaagatcgacgacttcaacgacgagctcaacaagctcctcgaggagatcgaggagaagaacccccagctcatcatcgacaccgagaagcaccacccctgggccgagcgcccctcctcccacgacttcatgatctga

SEQ ID NO: 9057 - RNA, 594 nt, synthetic construct
  misc_feature 1..594: note = derived and/or modified sequence opt3 fromNALP2__Homo_sapiens__AAG23171
  source 1..594: mol_type = other RNA
atgagccccctgtccctctctgtgtcaaaccctagacttaagagtcagaggtgcatcaccgccgtccggacacaccgcttcggctttgctttctttctgtggttgattagccgattatggaattgtgacataacttccgatgggtgctgtgacctgacgaaactactccaagagaagtcttcgctgctttgcctggatttgggactcaaccatatcggtgttaaaggcatgaagttcctgtgtgaagcactgcgtaaaccactctgcaatttaagatgtctgtggctttgggggtgctcaattccgccctttagctgtgaggacttgtgcagtgccctgtcctgtaaccagtctctagtgaccctcgatctgggacagaatcctcttggcagctccggtgtaaagatgctgttcgaaacattgacttgctcaagtgggaccctcaggacactgcggttaaagatcgacgattttaacgacgagctgaataaactccttgaagagattgaggaaaagaacccacagctgatcatagataccgagaaacaccatccctgggcggaacgccctagctctcacgacttcatgatctga

SEQ ID NO: 9058 - RNA, 594 nt, synthetic construct
  misc_feature 1..594: note = derived and/or modified sequence opt4 fromNALP2__Homo_sapiens__AAG23171
  source 1..594: mol_type = other RNA
atgagccccctgagcctgagcgtgagcaaccccagactgaagagccagagatgcatcaccgccgtgagaacccacagattcggcttcgccttcttcctgtggctgatcagcagactgtggaactgcgacatcaccagcgacggctgctgcgacctgaccaagctgctgcaggagaagagcagcctgctgtgcctggacctgggcctgaaccacatcggcgtgaagggcatgaagttcctgtgcgaggccctgagaaagcccctgtgcaacctgagatgcctgtggctgtggggctgcagcatcccccccttcagctgcgaggacctgtgcagcgccctgagctgcaaccagagcctggtgaccctggacctgggccagaaccccctgggcagcagcggcgtgaagatgctgttcgagaccctgacctgcagcagcggcaccctgagaaccctgagactgaagatcgacgacttcaacgacgagctgaacaagctgctggaggagatcgaggagaagaacccccagctgatcatcgacaccgagaagcaccacccctgggccgagagacccagcagccacgacttcatgatctga

SEQ ID NO: 9059 - RNA, 594 nt, synthetic construct
  misc_feature 1..594: note = derived and/or modified sequence opt5 fromNALP2__Homo_sapiens__AAG23171
  source 1..594: mol_type = other RNA
atgagccccctgtccctctctgtgagcaaccctagactgaagtcccagcggtgcatcaccgccgtccgcacacacagattcggctttgctttctttctttggctgatttctcggctctggaattgtgacatcacgagcgatgggtgctgtgacctgaccaaacttctgcaagagaagtcctctctcctgtgcctggatctcggactgaaccatattggcgttaaagggatgaagttcctttgtgaagccctgcgcaaaccgctctgcaatctgagatgtctttggctgtggggatgcagcattccccctttttcctgtgaggacctctgcagcgcgctgtcttgtaaccagtccctggtgacactcgatctgggccagaatccccttgggagctctggagtgaagatgctgttcgaaaccctcacatgctccagcggcaccctgcggacacttcgcctgaagatcgacgattttaacgacgagctcaataaactgctggaagagatcgaggaaaagaaccctcagctcatcattgataccgagaaacaccatccctgggctgaaagaccttcttcccacgacttcatgatctga

SEQ ID NO: 9060 - protein, 1062 aa, synthetic construct
  REGION 1..1062: note = NALP2__Homo_sapiens__Q9NX02
MVSSAQMGFNLQALLEQLSQDELSKFKYLITTFSLAHELQKIPHKEVDKADGKQLVEILTTHCDSYWVEMASLQVFEKMHRMDLSERAKDEVREAALKSFNKRKPLSLGITRKERPPLDVDEMLERFKTEAQAFTETKGNVICLGKEVFKGKKPDKDNRCRYILKTKFREMWKSWPGDSKEVQVMAERYKMLIPFSNPRVLPGPFSYTVVLYGPAGLGKTTLAQKLMLDWAEDNLIHKFKYAFYLSCRELSRLGPCSFAELVFRDWPELQDDIPHILAQARKILFVIDGFDELGAAPGALIEDICGDWEKKKPVPVLLGSLLNRVMLPKAALLVTTRPRALRDLRILAEEPIYIRVEGFLEEDRRAYFLRHFGDEDQAMRAFELMRSNAALFQLGSAPAVCWIVCTTLKLQMEKGEDPVPTCLTRTGLFLRFLCSRFPQGAQLRGALRTLSLLAAQGLWAQTSVLHREDLERLGVQESDLRLFLDGDILRQDRVSKGCYSFIHLSFQQFLTALFYTLEKEEEEDRDGHTWDIGDVQKLLSGVERLRNPDLIQAGYYSFGLANEKRAKELEATFGCRMSPDIKQELLRCDISCKGGHSTVTDLQELLGCLYESQEEELVKEVMAQFKEISLHLNAVDVVPSSFCVKHCRNLQKMSLQVIKENLPENVTASESDAEVERSQDDQHMLPFWTDLCSIFGSNKDLMGLAINDSFLSASLVRILCEQIASDTCHLQRVVFKNISPADAHRNLCLALRGHKTVTYLTLQGNDQDDMFPALCEVLRHPECNLRYLGLVSCSATTQQWADLSLALEVNQSLTCVNLSDNELLDEGAKLLYTTLRHPKCFLQRLSLENCHLTEANCKDLAAVLVVSRELTHLCLAKNPIGNTGVKFLCEGLRYPECKLQTLVLWNCDITSDGCCDLTKLLQEKSSLLCLDLGLNHIGVKGMKFLCEALRKPLCNLRCLWLWGCSIPPFSCEDLCSALSCNQSLVTLDLGQNPLGSSGVKMLFETLTCSSGTLRTLRLKIDDFNDELNKLLEEIEEKNPQLIIDTEKHHPWAERPSSHDFMI

SEQ ID NO: 9061 - RNA, 3189 nt, synthetic construct
  misc_feature 1..3189: note = NALP2__Homo_sapiens__AAG30289
  source 1..3189: mol_type = other RNA
atggtgtcttcggcgcagatgggcttcaacctgcaggctctcctggagcagctcagccaggatgagttgagcaagttcaagtatctgatcacgaccttctccctggcacacgagctccagaagatcccccacaaggaggtagacaaggctgatgggaagcaactggtagaaatcctcaccacccattgtgacagctactgggtggagatggcgagcctccaggtctttgaaaagatgcaccgaatggatctgtctgagagagcaaaggatgaagtcagagaagcagctttgaaatcctttaataaaaggaaacctctatcattagggataacacggaaagaacgaccacctctagacgtggacgaaatgctggagcgcttcaaaacagaagcacaagcgtttacagaaacgaaaggaaatgtcatctgcctgggtaaagaagtctttaaaggaaaaaagccagacaaagacaataggtgcaggtatatattgaagacgaagttccgggagatgtggaagagctggcctggagatagcaaagaggtccaggttatggctgagagatacaagatgctgatcccattcagcaaccccagggtgcttcccgggcccttctcatacacggtggtgctgtatggtcctgcaggccttgggaaaaccacgctggcccagaaactaatgctagactgggcagaggacaacctcatccacaaattcaaatatgcgttctacctcagctgcagggagctcagccgcctgggcccgtgcagttttgcagagctggtcttcagggactggcctgaattgcaggatgacattccacacatcctagcccaagcacggaaaatcttgttcgtgattgacggctttgatgagctgggagccgcacctggggcgctgatcgaggacatctgcggggactgggagaagaagaagccggtgcccgtcctcctggggagtttgctgaacagggtgatgttacccaaggccgccctgctggtcaccacgcggcccagggccctgagggacctccggatcctggcggaggagccgatctacataagggtggagggcttcctggaggaggacaggagggcctatttcctgagacactttggagacgaggaccaagccatgcgtgcctttgagctaatgaggagcaacgcggccctgttccagctgggctcggcccccgcggtgtgctggatcgtgtgcacgactctgaagctgcagatggagaagggggaggacccggtccccacctgcctcacccgcacggggctgttcctgcgtttcctctgcagccggttcccgcagggcgcacagctgcggggcgcgctgcggacgctgagcctcctggccgcgcagggcctgtgggcgcagacgtccgtgcttcaccgagaggatctggaaaggctcggggtgcaggagtccgacctccgtctgttcctggacggagacatcctccgccaggacagagtctccaaaggctgctactccttcatccacctcagcttccagcagtttctcactgccctgttctacaccctggagaaggaggaggaagaggatagggacggccacacctgggacattggggacgtacagaagctgctttccggagtagaaagactcaggaaccccgacctgatccaagcaggctactactcctttggcctcgctaacgagaagagagccaaggagttggaggccacttttggctgccggatgtcaccggacatcaaacaggaattgctgcgatgcgacataagttgtaagggtggacattcaacggtgacagacctgcaggagctcctcggctgtctgtacgagtctcaggaggaggagctggtgaaggaggtgatggctcagttcaaagaaatatccctgcacttaaatgcagtagacgttgtgccatcttcattctgcgtcaagcactgtcgaaacctgcagaaaatgtcactgcaggtaataaaggagaatctcccggagaatgtcactgcgtctgaatcagacgccgaggttgagagatcccaggatgatcagcacatgcttcctttctggacggacctttgttccatatttggatcaaataaggatctgatgggtctagcaatcaatgatagctttctcagtgcctccctagtaaggatcctgtgtgaacaaatagcctctgacacctgtcatctccagagagtggtgttcaaaaacatttccccagctgatgctcatcggaacctctgcctagctcttcgaggtcacaagactgtaacgtatctgacccttcaaggcaatgaccaggatgatatgtttcccgcattgtgtgaggtcttgagacatccagaatgtaacctgcgatatctcgggttggtgtcttgttccgctaccactcagcagtgggctgatctctccttggcccttgaagtcaaccagtccctgacgtgcgtaaacctctccgacaatgagcttctggatgagggtgctaagttgctgtacacaactttgagacaccccaagtgctttctgcagaggttgtcgttggaaaactgtcaccttacagaagccaattgcaaggaccttgctgctgtgttggttgtcagccgggagctgacacacctgtgcttggccaagaaccccattgggaatacaggggtgaagtttctgtgtgagggcttgaggtaccccgagtgtaaactgcagaccttggtgctttggaactgcgacataactagcgatggctgctgcgatctcacaaagcttctccaagaaaaatcaagcctgttgtgtttggatctggggctgaatcacataggagttaagggaatgaagttcctgtgtgaggctttgaggaaaccactgtgcaacttgagatgtctgtggttgtggggatgttccatccctccgttcagttgtgaagacctctgctctgccctcagctgcaaccagagcctcgtcactctggacctgggtcagaatcccttggggtctagtggagtgaagatgctgtttgaaaccttgacatgttccagtggcaccctccggacactcaggttgaaaatagatgactttaatgatgaactcaataagctgctggaagaaatagaagaaaaaaacccacaactgattattgatactgagaaacatcatccctgggcagaaaggccttcttctcatgacttcatgatctga

SEQ ID NO: 9062 - RNA, 3189 nt, synthetic construct
  misc_feature 1..3189: note = derived and/or modified sequence opt1 fromNALP2__Homo_sapiens__AAG30289
  source 1..3189: mol_type = other RNA
atggtgagctccgcccagatgggcttcaacctgcaggccctcctggagcagctgagccaggacgagctctccaagttcaagtacctgatcaccaccttcagcctggcgcacgagctccagaagatcccccacaaggaggtcgacaaggccgacgggaagcagctggtggagatcctgacgacccactgcgactcctactgggtggagatggccagcctccaggtcttcgagaagatgcaccgcatggacctgtccgagcgggccaaggacgaggtgcgcgaggccgcgctcaagagcttcaacaagcggaagccgctctccctgggcatcacccgcaaggagcggccgcccctggacgtggacgagatgctcgagcgcttcaagaccgaggcccaggccttcacggagaccaaggggaacgtcatctgcctgggcaaggaggtgttcaaggggaagaagcccgacaaggacaaccggtgccgctacatcctgaagaccaagttccgggagatgtggaagtcctggcccggcgacagcaaggaggtgcaggtcatggccgagcgctacaagatgctcatccccttcagcaacccccgggtgctgcccggcccgttctcctacaccgtggtcctgtacgggcccgcgggcctcgggaagacgaccctggcccagaagctgatgctcgactgggccgaggacaacctgatccacaagttcaagtacgccttctacctgagctgccgcgagctctcccggctgggcccctgcagcttcgccgagctggtgttccgcgactggcccgagctccaggacgacatcccgcacatcctggcgcaggcccggaagatcctgttcgtgatcgacgggttcgacgagctcggcgccgcccccggcgccctgatcgaggacatctgcggggactgggagaagaagaagcccgtccccgtgctgctcggctccctgctgaaccgcgtgatgctcccgaaggcggccctgctggtcaccacccggccccgcgccctccgggacctgcgcatcctggccgaggagcccatctacatccgggtggaggggttcctcgaggaggaccgccgcgcctacttcctgcggcacttcggcgacgaggaccaggcgatgcgcgccttcgagctgatgcggagcaacgccgccctcttccagctgggctccgcccccgcggtgtgctggatcgtctgcacgaccctgaagctgcagatggagaagggggaggacccggtgccgacctgcctcacccgcacgggcctgttcctgcggttcctctgcagccgcttcccccagggggcccagctgcggggcgccctgcgcaccctcagcctgctggccgcgcaggggctctgggcccagacctccgtgctgcaccgggaggacctggagcgcctcggcgtccaggagagcgacctgcggctgttcctcgacggcgacatcctgcgccaggaccgggtgtccaaggggtgctacagcttcatccacctgtccttccagcagttcctcaccgccctgttctacacgctggagaaggaggaggaggaggaccgcgacggccacacctgggacatcggggacgtccagaagctcctgagcggcgtggagcggctgcgcaaccccgacctcatccaggccgggtactactccttcggcctggccaacgagaagcgggcgaaggagctggaggccaccttcggctgccgcatgagccccgacatcaagcaggagctcctgcggtgcgacatctcctgcaagggcgggcacagcaccgtgacggacctgcaggagctcctggggtgcctgtacgagtcccaggaggaggagctcgtcaaggaggtgatggcccagttcaaggagatcagcctgcacctgaacgccgtggacgtcgtgccctccagcttctgcgtgaagcactgccgcaacctccagaagatgtccctgcaggtcatcaaggagaacctgcccgagaacgtgaccgccagcgagtccgacgcggaggtggagcgcagccaggacgaccagcacatgctccccttctggaccgacctgtgctccatcttcggcagcaacaaggacctgatggggctcgccatcaacgacagcttcctgtccgccagcctggtccggatcctctgcgagcagatcgcctccgacacgtgccacctccagcgcgtggtgttcaagaacatcagcccggccgacgcgcaccggaacctgtgcctggccctgcgcggccacaagaccgtcacctacctgaccctccagggcaacgaccaggacgacatgttccccgccctgtgcgaggtgctgcggcaccccgagtgcaacctccgctacctggggctggtgtcctgcagcgccaccacgcagcagtgggcggacctctccctggccctggaggtcaaccagagcctgacctgcgtgaacctgtccgacaacgagctgctcgacgagggcgccaagctgctgtacaccaccctccggcacccgaagtgcttcctgcagcgcctgagcctcgagaactgccacctgacggaggccaactgcaaggacctggccgcggtgctcgtcgtgtcccgggagctgacccacctgtgcctcgccaagaaccccatcgggaacaccggcgtgaagttcctgtgcgagggcctgcgctaccccgagtgcaagctccagaccctggtcctgtggaactgcgacatcaccagcgacgggtgctgcgacctcacgaagctgctgcaggagaagtccagcctcctgtgcctggacctcggcctgaaccacatcggggtgaagggcatgaagttcctgtgcgaggccctccggaagcccctgtgcaacctgcgctgcctctggctgtgggggtgctccatcccgcccttcagctgcgaggacctgtgctccgccctgagctgcaaccagagcctcgtgaccctggacctgggccagaaccccctcggctccagcggggtcaagatgctgttcgagaccctgacctgctccagcggcacgctccggaccctgcgcctgaagatcgacgacttcaacgacgagctcaacaagctgctggaggagatcgaggagaagaacccccagctcatcatcgacaccgagaagcaccacccgtgggccgagcggccctccagccacgacttcatgatctga

SEQ ID NO: 9063 - RNA, 3189 nt, synthetic construct
  misc_feature 1..3189: note = derived and/or modified sequence opt2 fromNALP2__Homo_sapiens__AAG30289
  source 1..3189: mol_type = other RNA
atggtctcctccgcccagatgggcttcaacctccaggccctcctcgagcagctctcccaggacgagctctccaagttcaagtacctcatcaccaccttctccctcgcccacgagctccagaagatcccccacaaggaggtcgacaaggccgacggcaagcagctcgtcgagatcctcaccacccactgcgactcctactgggtcgagatggcctccctccaggtcttcgagaagatgcaccgcatggacctctccgagcgcgccaaggacgaggtccgcgaggccgccctcaagtccttcaacaagcgcaagcccctctccctcggcatcacccgcaaggagcgcccccccctcgacgtcgacgagatgctcgagcgcttcaagaccgaggcccaggccttcaccgagaccaagggcaacgtcatctgcctcggcaaggaggtcttcaagggcaagaagcccgacaaggacaaccgctgccgctacatcctcaagaccaagttccgcgagatgtggaagtcctggcccggcgactccaaggaggtccaggtcatggccgagcgctacaagatgctcatccccttctccaacccccgcgtcctccccggccccttctcctacaccgtcgtcctctacggccccgccggcctcggcaagaccaccctcgcccagaagctcatgctcgactgggccgaggacaacctcatccacaagttcaagtacgccttctacctctcctgccgcgagctctcccgcctcggcccctgctccttcgccgagctcgtcttccgcgactggcccgagctccaggacgacatcccccacatcctcgcccaggcccgcaagatcctcttcgtcatcgacggcttcgacgagctcggcgccgcccccggcgccctcatcgaggacatctgcggcgactgggagaagaagaagcccgtccccgtcctcctcggctccctcctcaaccgcgtcatgctccccaaggccgccctcctcgtcaccacccgcccccgcgccctccgcgacctccgcatcctcgccgaggagcccatctacatccgcgtcgagggcttcctcgaggaggaccgccgcgcctacttcctccgccacttcggcgacgaggaccaggccatgcgcgccttcgagctcatgcgctccaacgccgccctcttccagctcggctccgcccccgccgtctgctggatcgtctgcaccaccctcaagctccagatggagaagggcgaggaccccgtccccacctgcctcacccgcaccggcctcttcctccgcttcctctgctcccgcttcccccagggcgcccagctccgcggcgccctccgcaccctctccctcctcgccgcccagggcctctgggcccagacctccgtcctccaccgcgaggacctcgagcgcctcggcgtccaggagtccgacctccgcctcttcctcgacggcgacatcctccgccaggaccgcgtctccaagggctgctactccttcatccacctctccttccagcagttcctcaccgccctcttctacaccctcgagaaggaggaggaggaggaccgcgacggccacacctgggacatcggcgacgtccagaagctcctctccggcgtcgagcgcctccgcaaccccgacctcatccaggccggctactactccttcggcctcgccaacgagaagcgcgccaaggagctcgaggccaccttcggctgccgcatgtcccccgacatcaagcaggagctcctccgctgcgacatctcctgcaagggcggccactccaccgtcaccgacctccaggagctcctcggctgcctctacgagtcccaggaggaggagctcgtcaaggaggtcatggcccagttcaaggagatctccctccacctcaacgccgtcgacgtcgtcccctcctccttctgcgtcaagcactgccgcaacctccagaagatgtccctccaggtcatcaaggagaacctccccgagaacgtcaccgcctccgagtccgacgccgaggtcgagcgctcccaggacgaccagcacatgctccccttctggaccgacctctgctccatcttcggctccaacaaggacctcatgggcctcgccatcaacgactccttcctctccgcctccctcgtccgcatcctctgcgagcagatcgcctccgacacctgccacctccagcgcgtcgtcttcaagaacatctcccccgccgacgcccaccgcaacctctgcctcgccctccgcggccacaagaccgtcacctacctcaccctccagggcaacgaccaggacgacatgttccccgccctctgcgaggtcctccgccaccccgagtgcaacctccgctacctcggcctcgtctcctgctccgccaccacccagcagtgggccgacctctccctcgccctcgaggtcaaccagtccctcacctgcgtcaacctctccgacaacgagctcctcgacgagggcgccaagctcctctacaccaccctccgccaccccaagtgcttcctccagcgcctctccctcgagaactgccacctcaccgaggccaactgcaaggacctcgccgccgtcctcgtcgtctcccgcgagctcacccacctctgcctcgccaagaaccccatcggcaacaccggcgtcaagttcctctgcgagggcctccgctaccccgagtgcaagctccagaccctcgtcctctggaactgcgacatcacctccgacggctgctgcgacctcaccaagctcctccaggagaagtcctccctcctctgcctcgacctcggcctcaaccacatcggcgtcaagggcatgaagttcctctgcgaggccctccgcaagcccctctgcaacctccgctgcctctggctctggggctgctccatcccccccttctcctgcgaggacctctgctccgccctctcctgcaaccagtccctcgtcaccctcgacctcggccagaaccccctcggctcctccggcgtcaagatgctcttcgagaccctcacctgctcctccggcaccctccgcaccctccgcctcaagatcgacgacttcaacgacgagctcaacaagctcctcgaggagatcgaggagaagaacccccagctcatcatcgacaccgagaagcaccacccctgggccgagcgcccctcctcccacgacttcatgatctga

SEQ ID NO: 9064 - RNA, 3189 nt, synthetic construct
  misc_feature 1..3189: note = derived and/or modified sequence opt3 fromNALP2__Homo_sapiens__AAG30289
  source 1..3189: mol_type = other RNA
atggtgagctccgcccagatgggcttcaacctgcaagctctccttgagcagctgtctcaggacgaattgtcaaagtttaaatacttaatcaccacattcagtctggcacacgagctacagaagattccccataaagaagtcgataaggccgacgggaaacaactcgttgagatactgactacgcactgcgatagctattgggtggaaatggcgtcccttcaggtatttgagaagatgcatagaatggacctgtctgagagggctaaggatgaagtgcgggaggccgcattgaaatcgttcaataagcgcaaacctctctcactgggaatcacccgaaaggaacgtccaccgctggacgtcgatgagatgctcgagagatttaaaacagaagcccaggctttcactgagaccaagggtaacgtgatttgtttaggcaaggaagtttttaaagggaagaaacccgacaaggataataggtgccggtacatcctgaaaacaaagttccgcgagatgtggaaaagctggcctggagacagtaaggaagtgcaggtcatggcagagagatataagatgcttattccattttccaaccccagggtgttgcctggcccattctcttacaccgtagttctgtatggtcccgccgggctaggaaaaactacactcgctcaaaagctgatgcttgattgggccgaggacaatctgatccacaaatttaagtacgcgttctatttgagctgtcgggaactctcccgcctgggcccttgctcatttgcagagttagtgttccgagattggccagaactgcaggacgacataccgcatatcctcgcccaggctagaaaaattcttttcgtcatcgatggctttgacgagctgggggccgcacccggagctttgattgaagatatctgtggtgactgggagaagaagaaacctgtgccagtgctactgggcagtctcctgaacagggtcatgcttcccaaggccgcgctgttggttaccacgcggcctcgtgccctccgcgatctgagaatattagcagaggaaccaatttacatcagggtggaggggttcctggaagaggaccggcgagcttactttctacgccacttcggagatgaagaccaggccatgagagcttttgagctcatgaggagcaatgccgcactgttccaacttggctctgcccccgctgtatgctggattgtgtgtactaccttgaaactgcagatggagaagggtgaagatccggtccctacatgcctcactcggaccgggctgtttcttcgcttcctgtgttccagatttccccagggagcgcaattgaggggcgcactccgtacactgtcattactggccgctcagggcctatgggcccagaccagcgtgctccaccgggaggacctggaacgacttggggttcaggagagtgatttgagactgttcctcgacggagacatcctgaggcaagatcgcgtgtctaaaggttgctattcctttatccatctgagcttccagcagtttttaacggcacttttctacactttggagaaggaagaggaagaggaccgggatggccacacatgggacattggggatgtccagaagctcctgtcgggagtggaaagactaaggaacccagacctgatacaagccggctattactctttcggtctcgctaatgagaaacgcgccaaggagctggaagcaacctttgggtgtcgaatgtcccctgatatcaaacaggagcttttgcggtgcgacatttcatgcaagggcggacatagtactgtaacagatctgcaggaattactcggctgtctgtatgagagccaggaagaggagcttgttaaagaagtgatggcgcaattcaaggagatctccctgcacttgaacgctgtcgacgtggtcccctctagcttttgcgtgaagcactgtcgtaatctccagaaaatgtcactgcaggttataaaggaaaacctaccagagaatgtgaccgccagtgaatccgatgcagaggtagagagaagccaggacgatcaacatatgctgcccttctggacggacctctgctctatttttgggtcaaacaaagacctgatgggacttgccatcaatgatagtttcttgagcgcttccctggtcaggatcttatgtgaacagattgcctctgatacctgccacctccagcgcgtggtttttaagaacatctcgcctgcagacgctcatcggaacctgtgtcttgccctgagaggtcacaaaacagtgacttacctaaccctccaaggcaatgaccaggatgacatgttcccagcgctgtgcgaggtcttgaggcatccggaatgtaacctgcgatatttagggctcgtgagctgctccgccacaactcagcagtgggctgatctgtcacttgcactggaggtaaatcaaagtttgacctgtgtgaacctctctgacaatgagctgctagatgaaggagccaagctgctttacacaaccctccgccaccccaaatgctttctgcagcggttgagcctggagaactgccacttaactgaagctaattgtaaggacctcgccgcagttctggtcgtgtccagagagcttacgcatctgtgcttggcgaagaaccctattggcaatacaggtgtgaaattcctctgtgaagggctgaggtacccagagtgcaagctacagaccctggtcctttggaactgtgatataacttcagacggctgctgtgatctcaccaaactgttgcaggaaaagagctctttactgtgcctcgacctgggacttaatcacatcggcgttaaagggatgaagtttctgtgtgaggccttgcgtaagcccctatgcaacctgcgctgtctctggctgtggggatgctccattcctccattcagttgcgaggacctttgtagcgctttatcttgcaatcaatccctggtgacactcgatttgggtcagaaccccctgggctcaagtggggtgaaaatgctctttgaaaccctgacttgtagctcgggaacacttcggacgctgagattgaagatcgacgatttcaatgacgagctaaacaaactgctcgaagagatcgaggaaaagaacccgcagttaattatagataccgagaaacatcacccttgggccgaaaggccatcctctcacgacttcatgatctga

SEQ ID NO: 9065 - RNA, 3189 nt, synthetic construct
  misc_feature 1..3189: note = derived and/or modified sequence opt4 fromNALP2__Homo_sapiens__AAG30289
  source 1..3189: mol_type = other RNA
atggtgagcagcgcccagatgggcttcaacctgcaggccctgctggagcagctgagccaggacgagctgagcaagttcaagtacctgatcaccaccttcagcctggcccacgagctgcagaagatcccccacaaggaggtggacaaggccgacggcaagcagctggtggagatcctgaccacccactgcgacagctactgggtggagatggccagcctgcaggtgttcgagaagatgcacagaatggacctgagcgagagagccaaggacgaggtgagagaggccgccctgaagagcttcaacaagagaaagcccctgagcctgggcatcaccagaaaggagagaccccccctggacgtggacgagatgctggagagattcaagaccgaggcccaggccttcaccgagaccaagggcaacgtgatctgcctgggcaaggaggtgttcaagggcaagaagcccgacaaggacaacagatgcagatacatcctgaagaccaagttcagagagatgtggaagagctggcccggcgacagcaaggaggtgcaggtgatggccgagagatacaagatgctgatccccttcagcaaccccagagtgctgcccggccccttcagctacaccgtggtgctgtacggccccgccggcctgggcaagaccaccctggcccagaagctgatgctggactgggccgaggacaacctgatccacaagttcaagtacgccttctacctgagctgcagagagctgagcagactgggcccctgcagcttcgccgagctggtgttcagagactggcccgagctgcaggacgacatcccccacatcctggcccaggccagaaagatcctgttcgtgatcgacggcttcgacgagctgggcgccgcccccggcgccctgatcgaggacatctgcggcgactgggagaagaagaagcccgtgcccgtgctgctgggcagcctgctgaacagagtgatgctgcccaaggccgccctgctggtgaccaccagacccagagccctgagagacctgagaatcctggccgaggagcccatctacatcagagtggagggcttcctggaggaggacagaagagcctacttcctgagacacttcggcgacgaggaccaggccatgagagccttcgagctgatgagaagcaacgccgccctgttccagctgggcagcgcccccgccgtgtgctggatcgtgtgcaccaccctgaagctgcagatggagaagggcgaggaccccgtgcccacctgcctgaccagaaccggcctgttcctgagattcctgtgcagcagattcccccagggcgcccagctgagaggcgccctgagaaccctgagcctgctggccgcccagggcctgtgggcccagaccagcgtgctgcacagagaggacctggagagactgggcgtgcaggagagcgacctgagactgttcctggacggcgacatcctgagacaggacagagtgagcaagggctgctacagcttcatccacctgagcttccagcagttcctgaccgccctgttctacaccctggagaaggaggaggaggaggacagagacggccacacctgggacatcggcgacgtgcagaagctgctgagcggcgtggagagactgagaaaccccgacctgatccaggccggctactacagcttcggcctggccaacgagaagagagccaaggagctggaggccaccttcggctgcagaatgagccccgacatcaagcaggagctgctgagatgcgacatcagctgcaagggcggccacagcaccgtgaccgacctgcaggagctgctgggctgcctgtacgagagccaggaggaggagctggtgaaggaggtgatggcccagttcaaggagatcagcctgcacctgaacgccgtggacgtggtgcccagcagcttctgcgtgaagcactgcagaaacctgcagaagatgagcctgcaggtgatcaaggagaacctgcccgagaacgtgaccgccagcgagagcgacgccgaggtggagagaagccaggacgaccagcacatgctgcccttctggaccgacctgtgcagcatcttcggcagcaacaaggacctgatgggcctggccatcaacgacagcttcctgagcgccagcctggtgagaatcctgtgcgagcagatcgccagcgacacctgccacctgcagagagtggtgttcaagaacatcagccccgccgacgcccacagaaacctgtgcctggccctgagaggccacaagaccgtgacctacctgaccctgcagggcaacgaccaggacgacatgttccccgccctgtgcgaggtgctgagacaccccgagtgcaacctgagatacctgggcctggtgagctgcagcgccaccacccagcagtgggccgacctgagcctggccctggaggtgaaccagagcctgacctgcgtgaacctgagcgacaacgagctgctggacgagggcgccaagctgctgtacaccaccctgagacaccccaagtgcttcctgcagagactgagcctggagaactgccacctgaccgaggccaactgcaaggacctggccgccgtgctggtggtgagcagagagctgacccacctgtgcctggccaagaaccccatcggcaacaccggcgtgaagttcctgtgcgagggcctgagataccccgagtgcaagctgcagaccctggtgctgtggaactgcgacatcaccagcgacggctgctgcgacctgaccaagctgctgcaggagaagagcagcctgctgtgcctggacctgggcctgaaccacatcggcgtgaagggcatgaagttcctgtgcgaggccctgagaaagcccctgtgcaacctgagatgcctgtggctgtggggctgcagcatcccccccttcagctgcgaggacctgtgcagcgccctgagctgcaaccagagcctggtgaccctggacctgggccagaaccccctgggcagcagcggcgtgaagatgctgttcgagaccctgacctgcagcagcggcaccctgagaaccctgagactgaagatcgacgacttcaacgacgagctgaacaagctgctggaggagatcgaggagaagaacccccagctgatcatcgacaccgagaagcaccacccctgggccgagagacccagcagccacgacttcatgatctga

SEQ ID NO: 9066 - RNA, 3189 nt, synthetic construct
  misc_feature 1..3189: note = derived and/or modified sequence opt5 fromNALP2__Homo_sapiens__AAG30289
  source 1..3189: mol_type = other RNA
atggtgagctccgcccagatgggcttcaacctgcaagctctcctggagcagctttctcaggacgaactgagcaagtttaaatacctcatcaccacattctccctggcccacgagcttcagaagattccccataaagaagtcgataaggcggacgggaaacaactggttgagatcctcacgacccactgcgattcttattgggtggaaatggctagccttcaggtgtttgagaagatgcatagaatggacctgtccgagcgggccaaggatgaagtccgcgaggccgctctcaaatctttcaataagagaaaacctctgagccttggaattacacggaaggaacgcccgcccctggacgtggatgagatgctcgagagatttaaaaccgaagcccaggctttcacagagaccaagggcaacgttatctgtctggggaaggaagtgtttaaaggaaagaaacctgacaaggataatcggtgccgctacattcttaaaacaaagttcagagagatgtggaaatcctggcccggcgacagcaaggaagtccaggtgatggccgagcggtataagatgctgatccctttttctaacccccgcgttctccctgggccgttctcctacaccgtggtcctgtatggacccgcgggcctgggcaaaacgaccctcgcccaaaagctgatgcttgattgggctgaggacaatctgatccacaaatttaagtacgccttctatctcagctgtagagaactgtctcggcttgggccttgctcctttgctgagctggtgttccgcgattggcccgaactccaggacgacattcctcatatcctggcccaggcgagaaaaattctgttcgtgatcgatggatttgacgagctcggcgccgctcccggggccctgattgaagatatctgtggagactgggagaagaagaaaccggtccctgttcttctgggcagcctcctgaaccgggtgatgcttcccaaggctgccctgctcgtgacaacccgccctagagccctgcgggatctgcggattctcgctgaggaacccatctacatccgcgtcgaggggttcctggaagaggaccggagagcgtactttcttcgccacttcggagatgaagaccaggccatgcgggcttttgagctgatgagatctaatgccgccctcttccaactgggctccgctcccgccgtgtgctggattgtttgtacaaccctgaaacttcagatggagaagggcgaagatcctgtgccgacgtgcctcacacgcaccgggctgtttctgcggttcctctgtagcagatttccccagggagcgcaactgcgcggcgctcttagaacactgtccctcctggccgcccaggggctgtgggctcagacctctgtccttcacagagaggacctcgaacgcctgggagtgcaggagagcgatctgagactcttcctggacggcgacatccttagacaagatcgggtttccaaagggtgctatagctttattcatctgtctttccagcagtttctcaccgccctgttctacacactggagaaggaagaggaagaggaccgcgatggacacacgtgggacatcggcgatgtgcagaagctgctctccggcgtcgaaagactgcggaaccctgacctgattcaagctgggtattacagcttcggactcgccaatgagaaaagagcgaaggagctggaagccacctttggctgtcgcatgtctcccgatatcaaacaggagcttctgcggtgcgacatcagctgcaaagggggacattccacagtgaccgatctccaggaactgctgggctgtctttatgagtctcaggaagaggagctcgtcaaggaagtgatggctcaattcaaggagattagcctgcacctgaacgccgttgacgtggtcccttccagcttttgcgtgaagcactgtagaaatctccagaaaatgtctctgcaggttatcaaggaaaaccttcccgagaatgtgacagcttccgaaagcgatgccgaggtcgagcgctctcaggacgatcaacatatgctgccgttctggaccgacctctgctccatttttgggagcaacaaagacctgatgggcctggcgatcaatgattccttcctttctgccagcctggtgcggattctctgtgaacagatcgcttccgacacgtgccatctgcagcgggtggtttttaagaacatctctcctgccgatgctcaccgcaacctctgtctggcccttagaggacacaaaacagtcacctacctgaccctccaaggcaatgaccaggatgacatgttccccgccctgtgcgaggtgctgcggcatcctgaatgtaaccttcgctatctggggctcgtgagctgctccgctacaacccagcagtgggcggatctgagcctcgccctggaggtcaatcaatctcttacatgtgtgaacctgtccgacaatgagctcctggatgaaggagctaagctgctttacacgaccctgagacaccccaaatgctttctccagcggctgagcctcgagaactgccacctgacagaagccaattgtaaggaccttgccgctgttctggtggtctctcgcgagctgacccatctctgcctggccaagaaccctattggcaatacaggggtgaaattcctttgtgaaggactgagataccccgagtgcaagctccagaccctggttctctggaactgtgatatcacgtccgacggctgctgtgatctgaccaaacttctgcaggaaaagagctctctgctctgcctggaccttgggctgaatcacattggcgtgaaaggaatgaagtttctctgtgaggcgctgcggaagccgctctgcaacctgcgctgtctttggctgtggggctgcagcatccctcccttctcctgcgaggacctgtgtagcgctctctcttgcaatcaatccctggtcacacttgatctggggcagaaccccctcggaagctccggcgtgaaaatgctgtttgaaaccctcacatgttctagcgggaccctgagaacgcttcggctgaagattgacgatttcaatgacgagctgaacaaactcctggaagagatcgaggaaaagaaccctcagcttattatcgatacagagaaacatcacccgtgggccgaaagaccctcctctcacgacttcatgatctga

SEQ ID NO: 9067 - protein, 1036 aa, synthetic construct
  REGION 1..1036: note = NALP3__Homo_sapiens__Q96P20
MKMASTRCKLARYLEDLEDVDLKKFKMHLEDYPPQKGCIPLPRGQTEKADHVDLATLMIDFNGEEKAWAMAVWIFAAINRRDLYEKAKRDEPKWGSDNARVSNPTVICQEDSIEEEWMGLLEYLSRISICKMKKDYRKKYRKYVRSRFQCIEDRNARLGESVSLNKRYTRLRLIKEHRSQQEREQELLAIGKTKTCESPVSPIKMELLFDPDDEHSEPVHTVVFQGAAGIGKTILARKMMLDWASGTLYQDRFDYLFYIHCREVSLVTQRSLGDLIMSCCPDPNPPIHKIVRKPSRILFLMDGFDELQGAFDEHIGPLCTDWQKAERGDILLSSLIRKKLLPEASLLITTRPVALEKLQHLLDHPRHVEILGFSEAKRKEYFFKYFSDEAQARAAFSLIQENEVLFTMCFIPLVCWIVCTGLKQQMESGKSLAQTSKTTTAVYVFFLSSLLQPRGGSQEHGLCAHLWGLCSLAADGIWNQKILFEESDLRNHGLQKADVSAFLRMNLFQKEVDCEKFYSFIHMTFQEFFAAMYYLLEEEKEGRTNVPGSRLKLPSRDVTVLLENYGKFEKGYLIFVVRFLFGLVNQERTSYLEKKLSCKISQQIRLELLKWIEVKAKAKKLQIQPSQLELFYCLYEMQEEDFVQRAMDYFPKIEINLSTRMDHMVSSFCIENCHRVESLSLGFLHNMPKEEEEEEKEGRHLDMVQCVLPSSSHAACSHGLVNSHLTSSFCRGLFSVLSTSQSLTELDLSDNSLGDPGMRVLCETLQHPGCNIRRLWLGRCGLSHECCFDISLVLSSNQKLVELDLSDNALGDFGIRLLCVGLKHLLCNLKKLWLVSCCLTSACCQDLASVLSTSHSLTRLYVGENALGDSGVAILCEKAKNPQCNLQKLGLVNSGLTSVCCSALSSVLSTNQNLTHLYLRGNTLGDKGIKLLCEGLLHPDCKLQVLELDNCNLTSHCCWDLSTLLTSSQSLRKLSLGNNDLGDLGVMMFCEVLKQQSCLLQNLGLSEMYFNYETKSALETLQEEKPELTVVFEPSW

SEQ ID NO: 9068 - RNA, 3111 nt, synthetic construct
  misc_feature 1..3111: note = NALP3__Homo_sapiens__AAI43363
  source 1..3111: mol_type = other RNA
atgaagatggcaagcacccgctgcaagctggccaggtacctggaggacctggaggatgtggacttgaagaaatttaagatgcacttagaggactatcctccccagaagggctgcatccccctcccgaggggtcagacagagaaggcagaccatgtggatctagccacgctaatgatcgacttcaatggggaggagaaggcgtgggccatggccgtgtggatcttcgctgcgatcaacaggagagacctttatgagaaagcaaaaagagatgagccgaagtggggttcagataatgcacgtgtttcgaatcccactgtgatatgccaggaagacagcattgaagaggagtggatgggtttactggagtacctttcgagaatctctatttgtaaaatgaagaaagattaccgtaagaagtacagaaagtacgtgagaagcagattccagtgcattgaagacaggaatgcccgtctgggtgagagtgtgagcctcaacaaacgctacacacgactgcgtctcatcaaggagcaccggagccagcaggagagggagcaggagcttctggccatcggcaagaccaagacgtgtgagagccccgtgagtcccattaagatggagttgctgtttgaccccgatgatgagcattctgagcctgtgcacactgtggtgttccagggggcggcagggattgggaaaacaatcctggccaggaagatgatgttggactgggcgtcggggacactctaccaagacaggtttgactatctgttctatatccactgtcgggaggtgagccttgtgacacagaggagcctgggggacctgatcatgagctgctgccccgacccaaacccacccatccacaagatcgtgagaaaaccctccagaatcctcttcctcatggacggcttcgatgagctgcaaggtgcctttgacgagcacataggaccgctctgcactgactggcagaaggccgagcggggagacattctcctgagcagcctcatcagaaagaagctgcttcccgaggcctctctgctcatcaccacgagacctgtggccctggagaaactgcagcacttgctggaccatcctcggcatgtggagatcctgggtttctccgaggccaaaaggaaagagtacttcttcaagtacttctctgatgaggcccaagccagggcagccttcagtctgattcaggagaacgaggtcctcttcaccatgtgcttcatccccctggtctgctggatcgtgtgcactggactgaaacagcagatggagagtggcaagagccttgcccagacatccaagaccaccaccgcggtgtacgtcttcttcctttccagtttgctgcagccccggggagggagccaggagcacggcctctgcgcccacctctgggggctctgctctttggctgcagatggaatctggaaccagaaaatcctgtttgaggagtccgacctcaggaatcatggactgcagaaggcggatgtgtctgctttcctgaggatgaacctgttccaaaaggaagtggactgcgagaagttctacagcttcatccacatgactttccaggagttctttgccgccatgtactacctgctggaagaggaaaaggaaggaaggacgaacgttccagggagtcgtttgaagcttcccagccgagacgtgacagtccttctggaaaactatggcaaattcgaaaaggggtatttgatttttgttgtacgtttcctctttggcctggtaaaccaggagaggacctcctacttggagaagaaattaagttgcaagatctctcagcaaatcaggctggagctgctgaaatggattgaagtgaaagccaaagctaaaaagctgcagatccagcccagccagctggaattgttctactgtttgtacgagatgcaggaggaggacttcgtgcaaagggccatggactatttccccaagattgagatcaatctctccaccagaatggaccacatggtttcttccttttgcattgagaactgtcatcgggtggagtcactgtccctggggtttctccataacatgcccaaggaggaagaggaggaggaaaaggaaggccgacaccttgatatggtgcagtgtgtcctcccaagctcctctcatgctgcctgttctcatggattggtgaacagccacctcacttccagtttttgccggggcctcttttcagttctgagcaccagccagagtctaactgaattggacctcagtgacaattctctgggggacccagggatgagagtgttgtgtgaaacgctccagcatcctggctgtaacattcggagattgtggttggggcgctgtggcctctcgcatgagtgctgcttcgacatctccttggtcctcagcagcaaccagaagctggtggagctggacctgagtgacaacgccctcggtgacttcggaatcagacttctgtgtgtgggactgaagcacctgttgtgcaatctgaagaagctctggttggtcagctgctgcctcacatcagcatgttgtcaggatcttgcatcagtattgagcaccagccattccctgaccagactctatgtgggggagaatgccttgggagactcaggagtcgcaattttatgtgaaaaagccaagaatccacagtgtaacctgcagaaactggggttggtgaattctggccttacgtcagtctgttgttcagctttgtcctcggtactcagcactaatcagaatctcacgcacctttacctgcgaggcaacactctcggagacaaggggatcaaactactctgtgagggactcttgcaccccgactgcaagcttcaggtgttggaattagacaactgcaacctcacgtcacactgctgctgggatctttccacacttctgacctccagccagagcctgcgaaagctgagcctgggcaacaatgacctgggcgacctgggggtcatgatgttctgtgaagtgctgaaacagcagagctgcctcctgcagaacctggggttgtctgaaatgtatttcaattatgagacaaaaagtgcgttagaaacacttcaagaagaaaagcctgagctgaccgtcgtctttgagccttcttggtag

SEQ ID NO: 9069 - RNA, 3111 nt, synthetic construct
  misc_feature 1..3111: note = derived and/or modified sequence opt1 fromNALP3__Homo_sapiens__AAI43363
  source 1..3111: mol_type = other RNA
atgaagatggccagcacccgctgcaagctggcccggtacctcgaggacctggaggacgtggacctgaagaagttcaagatgcacctcgaggactacccgccccagaagggctgcatccccctgccccgcgggcagaccgagaaggcggaccacgtcgacctggccacgctcatgatcgacttcaacggcgaggagaaggcctgggccatggccgtgtggatcttcgcggccatcaaccggcgcgacctgtacgagaaggccaagcgggacgagcccaagtgggggtccgacaacgcccgcgtgagcaacccgaccgtcatctgccaggaggactccatcgaggaggagtggatgggcctgctcgagtacctgagccggatctccatctgcaagatgaagaaggactaccgcaagaagtaccggaagtacgtgcgcagccggttccagtgcatcgaggaccgcaacgcgcggctgggggagtccgtgagcctcaacaagcgctacacccggctgcgcctgatcaaggagcaccggtcccagcaggagcgcgagcaggagctcctggccatcggcaagaccaagacgtgcgagagccccgtctcccccatcaagatggagctgctgttcgaccccgacgacgagcacagcgagccggtgcacaccgtggtcttccagggcgccgccgggatcggcaagaccatcctggcccggaagatgatgctggactgggcgtccgggaccctctaccaggaccgcttcgactacctgttctacatccactgccgggaggtgagcctggtgacgcagcgctccctcggcgacctgatcatgagctgctgccccgaccccaacccgcccatccacaagatcgtccgcaagccctcccggatcctgttcctcatggacgggttcgacgagctgcagggcgccttcgacgagcacatcggccccctgtgcaccgactggcagaaggccgagcgcggggacatcctcctgagctccctgatccggaagaagctcctgcccgaggccagcctgctcatcaccacccgcccggtggccctggagaagctgcagcacctcctggaccacccccggcacgtggagatcctgggcttcagcgaggcgaagcgcaaggagtacttcttcaagtacttctccgacgaggcccaggcccgggccgccttcagcctcatccaggagaacgaggtcctgttcacgatgtgcttcatccccctggtgtgctggatcgtgtgcaccgggctcaagcagcagatggagtccggcaagagcctggcgcagacctccaagaccacgaccgccgtctacgtgttcttcctgagctccctcctgcagccccgcggcgggagccaggagcacggcctgtgcgcccacctgtgggggctctgctccctggccgccgacggcatctggaaccagaagatcctgttcgaggagagcgacctccggaaccacgggctgcagaaggcggacgtgtccgccttcctgcgcatgaacctcttccagaaggaggtcgactgcgagaagttctacagcttcatccacatgaccttccaggagttcttcgccgccatgtactacctgctggaggaggagaaggagggccggaccaacgtgccgggctcccgcctcaagctgcccagccgggacgtgacggtcctgctcgagaactacgggaagttcgagaagggctacctgatcttcgtggtccgcttcctgttcgggctcgtgaaccaggagcggacctcctacctggagaagaagctgagctgcaagatctcccagcagatccgcctcgagctgctgaagtggatcgaggtgaaggcgaaggccaagaagctccagatccagcccagccagctggagctgttctactgcctctacgagatgcaggaggaggacttcgtccagcgggccatggactacttccccaagatcgagatcaacctgtccacccgcatggaccacatggtgagcagcttctgcatcgagaactgccaccgggtggagtccctgagcctcggcttcctgcacaacatgccgaaggaggaggaggaggaggagaaggaggggcgccacctggacatggtccagtgcgtgctcccctccagctcccacgccgcctgcagccacggcctggtgaactcccacctgaccagctccttctgccgcggcctcttcagcgtcctgtccacgagccagtccctgaccgagctcgacctgagcgacaactccctgggggaccccggcatgcgggtgctctgcgagaccctgcagcaccccgggtgcaacatccgccggctgtggctcggccgctgcgggctgagccacgagtgctgcttcgacatctccctggtgctcagcagcaaccagaagctggtcgagctggacctctccgacaacgcgctgggcgacttcggcatccggctgctctgcgtggggctgaagcacctcctctgcaacctgaagaagctgtggctcgtgagctgctgcctgacctccgcctgctgccaggacctggccagcgtcctctccacgagccactccctgacccgcctgtacgtgggcgagaacgccctcggggacagcggcgtggccatcctgtgcgagaaggcgaagaacccgcagtgcaacctgcagaagctcggcctggtcaactccgggctgaccagcgtgtgctgctccgccctcagctccgtgctgagcaccaaccagaacctgacgcacctctacctgcggggcaacaccctgggggacaagggcatcaagctcctgtgcgaggggctgctccaccccgactgcaagctgcaggtcctggagctcgacaactgcaacctgacctcccactgctgctgggacctgagcaccctcctgacgtccagccagtccctgcgcaagctcagcctgggcaacaacgacctgggcgacctcggggtgatgatgttctgcgaggtgctgaagcagcagagctgcctgctccagaacctgggcctgtccgagatgtacttcaactacgagaccaagagcgccctggagaccctccaggaggagaagcccgagctgaccgtcgtgttcgagccgtcctggtga

SEQ ID NO: 9070 - RNA, 3111 nt, synthetic construct
  misc_feature 1..3111: note = derived and/or modified sequence opt2 fromNALP3__Homo_sapiens__AAI43363
  source 1..3111: mol_type = other RNA
atgaagatggcctccacccgctgcaagctcgcccgctacctcgaggacctcgaggacgtcgacctcaagaagttcaagatgcacctcgaggactaccccccccagaagggctgcatccccctcccccgcggccagaccgagaaggccgaccacgtcgacctcgccaccctcatgatcgacttcaacggcgaggagaaggcctgggccatggccgtctggatcttcgccgccatcaaccgccgcgacctctacgagaaggccaagcgcgacgagcccaagtggggctccgacaacgcccgcgtctccaaccccaccgtcatctgccaggaggactccatcgaggaggagtggatgggcctcctcgagtacctctcccgcatctccatctgcaagatgaagaaggactaccgcaagaagtaccgcaagtacgtccgctcccgcttccagtgcatcgaggaccgcaacgcccgcctcggcgagtccgtctccctcaacaagcgctacacccgcctccgcctcatcaaggagcaccgctcccagcaggagcgcgagcaggagctcctcgccatcggcaagaccaagacctgcgagtcccccgtctcccccatcaagatggagctcctcttcgaccccgacgacgagcactccgagcccgtccacaccgtcgtcttccagggcgccgccggcatcggcaagaccatcctcgcccgcaagatgatgctcgactgggcctccggcaccctctaccaggaccgcttcgactacctcttctacatccactgccgcgaggtctccctcgtcacccagcgctccctcggcgacctcatcatgtcctgctgccccgaccccaacccccccatccacaagatcgtccgcaagccctcccgcatcctcttcctcatggacggcttcgacgagctccagggcgccttcgacgagcacatcggccccctctgcaccgactggcagaaggccgagcgcggcgacatcctcctctcctccctcatccgcaagaagctcctccccgaggcctccctcctcatcaccacccgccccgtcgccctcgagaagctccagcacctcctcgaccacccccgccacgtcgagatcctcggcttctccgaggccaagcgcaaggagtacttcttcaagtacttctccgacgaggcccaggcccgcgccgccttctccctcatccaggagaacgaggtcctcttcaccatgtgcttcatccccctcgtctgctggatcgtctgcaccggcctcaagcagcagatggagtccggcaagtccctcgcccagacctccaagaccaccaccgccgtctacgtcttcttcctctcctccctcctccagccccgcggcggctcccaggagcacggcctctgcgcccacctctggggcctctgctccctcgccgccgacggcatctggaaccagaagatcctcttcgaggagtccgacctccgcaaccacggcctccagaaggccgacgtctccgccttcctccgcatgaacctcttccagaaggaggtcgactgcgagaagttctactccttcatccacatgaccttccaggagttcttcgccgccatgtactacctcctcgaggaggagaaggagggccgcaccaacgtccccggctcccgcctcaagctcccctcccgcgacgtcaccgtcctcctcgagaactacggcaagttcgagaagggctacctcatcttcgtcgtccgcttcctcttcggcctcgtcaaccaggagcgcacctcctacctcgagaagaagctctcctgcaagatctcccagcagatccgcctcgagctcctcaagtggatcgaggtcaaggccaaggccaagaagctccagatccagccctcccagctcgagctcttctactgcctctacgagatgcaggaggaggacttcgtccagcgcgccatggactacttccccaagatcgagatcaacctctccacccgcatggaccacatggtctcctccttctgcatcgagaactgccaccgcgtcgagtccctctccctcggcttcctccacaacatgcccaaggaggaggaggaggaggagaaggagggccgccacctcgacatggtccagtgcgtcctcccctcctcctcccacgccgcctgctcccacggcctcgtcaactcccacctcacctcctccttctgccgcggcctcttctccgtcctctccacctcccagtccctcaccgagctcgacctctccgacaactccctcggcgaccccggcatgcgcgtcctctgcgagaccctccagcaccccggctgcaacatccgccgcctctggctcggccgctgcggcctctcccacgagtgctgcttcgacatctccctcgtcctctcctccaaccagaagctcgtcgagctcgacctctccgacaacgccctcggcgacttcggcatccgcctcctctgcgtcggcctcaagcacctcctctgcaacctcaagaagctctggctcgtctcctgctgcctcacctccgcctgctgccaggacctcgcctccgtcctctccacctcccactccctcacccgcctctacgtcggcgagaacgccctcggcgactccggcgtcgccatcctctgcgagaaggccaagaacccccagtgcaacctccagaagctcggcctcgtcaactccggcctcacctccgtctgctgctccgccctctcctccgtcctctccaccaaccagaacctcacccacctctacctccgcggcaacaccctcggcgacaagggcatcaagctcctctgcgagggcctcctccaccccgactgcaagctccaggtcctcgagctcgacaactgcaacctcacctcccactgctgctgggacctctccaccctcctcacctcctcccagtccctccgcaagctctccctcggcaacaacgacctcggcgacctcggcgtcatgatgttctgcgaggtcctcaagcagcagtcctgcctcctccagaacctcggcctctccgagatgtacttcaactacgagaccaagtccgccctcgagaccctccaggaggagaagcccgagctcaccgtcgtcttcgagccctcctggtga

SEQ ID NO: 9071 - RNA, 3111 nt, synthetic construct
  misc_feature 1..3111: note = derived and/or modified sequence opt3 fromNALP3__Homo_sapiens__AAI43363
  source 1..3111: mol_type = other RNA
atgaagatggccagcaccagatgcaaactggctaggtacctcgaggaccttgaagatgtggacctgaagaaattcaagatgcacttggaggattatccccctcagaaaggctgtatcccattaccgcgggggcaaacagaaaaggcagaccatgtcgatctggccactctaatgattgactttaacggagaggaaaaggcgtgggctatggccgtttggatattcgcagccatcaatcgccgagatctctacgagaaagctaagcgtgacgagcccaaatggggttccgataacgcaagagtgtctaatcctacggtaatttgccaggaagactcaatcgaggaagagtggatgggcctgcttgagtatctgagtaggattagcatctgtaagatgaaaaaggattaccggaagaaatatcgcaagtacgtgagatccaggtttcagtgcatagaagaccggaacgcccgcttgggggagtctgtctcgctcaataaacgatataccagactgaggctgatcaaggaacaccggtcacagcaagagcgtgaacaggagctcttagctattggaaaaacaaagacttgtgagagcccagtgagtcccatcaaaatggaactgcttttcgatcctgacgacgagcattccgaaccagttcacaccgtggtctttcagggcgccgcgggtattgggaagacaatcttggcacgcaagatgatgctggattgggcctctggaaccctataccaggacagattcgattacctcttttatatacattgcagggaggtgagcctggtaactcaacggtcccttggcgacctgattatgtcatgttgccccgatcctaacccaccgatccacaaaattgttcgaaagcccagtcgcatcttgttcctcatggacggctttgatgaactgcagggggctttcgacgagcacatcggacctttatgtacagattggcagaaagccgagagaggtgacattctgctcagctctcttataaggaagaaactgttgccagaagcatccctactgatcaccacgcggcccgtggctctcgagaagctgcagcatcttctggatcaccctcgccatgtcgaaattttgggcttttcagaggccaagagaaaagaatacttctttaagtatttcagcgacgaggcgcaagccagggcagctttcagtctcatccaggagaatgaagtgctgtttactatgtgcttcataccattagtgtgttggattgtctgcaccgggctgaaacagcaaatggagtctggaaagtccctagcccagacaagcaaaactaccacagctgtttacgtgtttttcctctcgtctctgcttcagccccgtggcggttcccaggaacacgggttgtgcgcccacctgtggggactctgttcactggcagccgacggcatctggaaccaaaagatcctttttgaggagagtgatctgcggaatcatggcttgcagaaggctgacgtaagcgcgttcctccgaatgaacctgtttcagaaagaagtggattgcgagaagttctattcctttattcacatgaccttccaggaatttttcgcagccatgtactatttactggaggaagagaaagaggggagaacgaatgtcccgggatctaggctaaagctccctagccgcgacgtgactgttctgcttgaaaactacggtaaatttgagaagggctacttgatcttcgtggtccggttcctgtttgggctcgtgaatcaagaaagaacatcatatctggagaagaaattaagttgtaagatttcccagcagataaggctggaacttttgaaatggatcgaggtaaaggctaaagccaagaaactccagattcaacccagccagctggagctattctactgcctgtatgaaatgcaggaggaagattttgttcagcgcgcaatggactacttcccaaagatcgagatcaacctctctacccgaatggatcatatggtgtcaagtttttgtattgaaaattgccaccgggtcgagagcctgtcccttggattcttgcataacatgcctaaggaggaagaggaagaggagaaagaaggccgtcacctggacatggtgcaatgtgtcttaccctcttcgagccacgccgcttgctcccatggtctcgtgaactcacacctgacaagttctttttgtagagggcttttcagcgttctgtccacttcacagagcttgaccgagctcgatctgtctgacaattccctaggcgatccaggaatgagggtgctgtgcgaaacgctccagcatcccggctgtaacatacgccggctgtggcttgggagatgcggattgagtcacgagtgctgttttgacatcagcctggtattatcttccaatcaaaagctcgtcgaactggatctttcagacaacgccctgggtgacttcggcattaggctactctgcgtggggctgaaacacttgctgtgtaatttaaagaaactctggctggttagttgctgtcttaccagcgcatgctgtcaggatctggcgtcggtgttgtccacatctcatagcctcactcgactgtatgtcggagagaacgctctaggcgactcaggtgtggccatcctgtgcgagaaggcaaagaatcctcagtgtaaccttcagaaactcgggctggtaaatagtggcttgacctccgtgtgctgttctgccctgagctccgttttatcaacaaaccaaaatctcactcacctgtaccttcgcggaaacaccctgggcgataaggggattaaattgctctgcgaaggactgctacatccagactgcaagctgcaggtccttgagctcgataattgtaacctgacaagccactgctgttgggacttgagtaccttactgacttcttcccagagcctccggaaactgtcgcttggtaataacgatctgggcgacttgggggtgatgatgttttgcgaagtgctaaagcagcaatcatgtctgctccagaacctgggactttctgagatgtatttcaattacgaaacgaagagtgctttagagacactgcaggaggaaaaaccggagctcaccgtcgtttttgaaccctcctggtga

SEQ ID NO: 9072 - RNA, 3111 nt, synthetic construct
  misc_feature 1..3111: note = derived and/or modified sequence opt4 fromNALP3__Homo_sapiens__AAI43363
  source 1..3111: mol_type = other RNA
atgaagatggccagcaccagatgcaagctggccagatacctggaggacctggaggacgtggacctgaagaagttcaagatgcacctggaggactaccccccccagaagggctgcatccccctgcccagaggccagaccgagaaggccgaccacgtggacctggccaccctgatgatcgacttcaacggcgaggagaaggcctgggccatggccgtgtggatcttcgccgccatcaacagaagagacctgtacgagaaggccaagagagacgagcccaagtggggcagcgacaacgccagagtgagcaaccccaccgtgatctgccaggaggacagcatcgaggaggagtggatgggcctgctggagtacctgagcagaatcagcatctgcaagatgaagaaggactacagaaagaagtacagaaagtacgtgagaagcagattccagtgcatcgaggacagaaacgccagactgggcgagagcgtgagcctgaacaagagatacaccagactgagactgatcaaggagcacagaagccagcaggagagagagcaggagctgctggccatcggcaagaccaagacctgcgagagccccgtgagccccatcaagatggagctgctgttcgaccccgacgacgagcacagcgagcccgtgcacaccgtggtgttccagggcgccgccggcatcggcaagaccatcctggccagaaagatgatgctggactgggccagcggcaccctgtaccaggacagattcgactacctgttctacatccactgcagagaggtgagcctggtgacccagagaagcctgggcgacctgatcatgagctgctgccccgaccccaacccccccatccacaagatcgtgagaaagcccagcagaatcctgttcctgatggacggcttcgacgagctgcagggcgccttcgacgagcacatcggccccctgtgcaccgactggcagaaggccgagagaggcgacatcctgctgagcagcctgatcagaaagaagctgctgcccgaggccagcctgctgatcaccaccagacccgtggccctggagaagctgcagcacctgctggaccaccccagacacgtggagatcctgggcttcagcgaggccaagagaaaggagtacttcttcaagtacttcagcgacgaggcccaggccagagccgccttcagcctgatccaggagaacgaggtgctgttcaccatgtgcttcatccccctggtgtgctggatcgtgtgcaccggcctgaagcagcagatggagagcggcaagagcctggcccagaccagcaagaccaccaccgccgtgtacgtgttcttcctgagcagcctgctgcagcccagaggcggcagccaggagcacggcctgtgcgcccacctgtggggcctgtgcagcctggccgccgacggcatctggaaccagaagatcctgttcgaggagagcgacctgagaaaccacggcctgcagaaggccgacgtgagcgccttcctgagaatgaacctgttccagaaggaggtggactgcgagaagttctacagcttcatccacatgaccttccaggagttcttcgccgccatgtactacctgctggaggaggagaaggagggcagaaccaacgtgcccggcagcagactgaagctgcccagcagagacgtgaccgtgctgctggagaactacggcaagttcgagaagggctacctgatcttcgtggtgagattcctgttcggcctggtgaaccaggagagaaccagctacctggagaagaagctgagctgcaagatcagccagcagatcagactggagctgctgaagtggatcgaggtgaaggccaaggccaagaagctgcagatccagcccagccagctggagctgttctactgcctgtacgagatgcaggaggaggacttcgtgcagagagccatggactacttccccaagatcgagatcaacctgagcaccagaatggaccacatggtgagcagcttctgcatcgagaactgccacagagtggagagcctgagcctgggcttcctgcacaacatgcccaaggaggaggaggaggaggagaaggagggcagacacctggacatggtgcagtgcgtgctgcccagcagcagccacgccgcctgcagccacggcctggtgaacagccacctgaccagcagcttctgcagaggcctgttcagcgtgctgagcaccagccagagcctgaccgagctggacctgagcgacaacagcctgggcgaccccggcatgagagtgctgtgcgagaccctgcagcaccccggctgcaacatcagaagactgtggctgggcagatgcggcctgagccacgagtgctgcttcgacatcagcctggtgctgagcagcaaccagaagctggtggagctggacctgagcgacaacgccctgggcgacttcggcatcagactgctgtgcgtgggcctgaagcacctgctgtgcaacctgaagaagctgtggctggtgagctgctgcctgaccagcgcctgctgccaggacctggccagcgtgctgagcaccagccacagcctgaccagactgtacgtgggcgagaacgccctgggcgacagcggcgtggccatcctgtgcgagaaggccaagaacccccagtgcaacctgcagaagctgggcctggtgaacagcggcctgaccagcgtgtgctgcagcgccctgagcagcgtgctgagcaccaaccagaacctgacccacctgtacctgagaggcaacaccctgggcgacaagggcatcaagctgctgtgcgagggcctgctgcaccccgactgcaagctgcaggtgctggagctggacaactgcaacctgaccagccactgctgctgggacctgagcaccctgctgaccagcagccagagcctgagaaagctgagcctgggcaacaacgacctgggcgacctgggcgtgatgatgttctgcgaggtgctgaagcagcagagctgcctgctgcagaacctgggcctgagcgagatgtacttcaactacgagaccaagagcgccctggagaccctgcaggaggagaagcccgagctgaccgtggtgttcgagcccagctggtga

SEQ ID NO: 9073 - RNA, 3111 nt, synthetic construct
  misc_feature 1..3111: note = derived and/or modified sequence opt5 fromNALP3__Homo_sapiens__AAI43363
  source 1..3111: mol_type = other RNA
atgaagatggccagcaccagatgcaaactggctcggtacctcgaggacctggaagatgtggaccttaagaaattcaagatgcacctggaggattatccccctcagaaaggctgtatcccgctcccccgcgggcaaacagaaaaggccgaccatgtcgatctggcgacgcttatgattgactttaacggagaggaaaaggcttgggccatggccgtttggatcttcgctgccattaatagacgggatctgtacgagaaagctaagcgcgacgagcctaaatggggctccgataacgccagagtgtctaatcccaccgtgatctgccaggaagacagcattgaggaagagtggatggggctcctggagtatctgtcccggatctctatctgtaagatgaaaaaggattaccgcaagaaatatagaaagtacgtccggagccgctttcagtgcattgaagacagaaacgcgcggctcggagagtccgtgtctctgaataaacgctatacaagacttcggctgatcaaggaacaccgcagccagcaagagagagaacaggagctcctggccattggcaaaaccaagacatgtgagtcccctgttagccccatcaaaatggaacttctgttcgatcctgacgacgagcattctgaaccggtgcacaccgtcgtgtttcagggggctgccggaattggcaagacaatcctcgctcggaagatgatgctggattgggcctccggcaccctgtaccaggacagattcgattacctcttttatattcattgccgcgaggttagcctggtgacgcaacggtctcttggggacctgatcatgtcctgttgccccgatcctaatccccctatccacaaaattgtcagaaagcccagccgcatcctcttcctgatggacggatttgatgaacttcagggcgcgttcgacgagcacattgggccgctgtgtaccgattggcagaaagccgagcggggagacatcctcctgtcttccctgattagaaagaaactcctgcctgaagctagccttctgatcacaacccgccccgtggccctcgagaagctgcagcatcttctggatcaccctcggcatgtggaaatcctcggcttttccgaggctaagagaaaagaatacttctttaagtatttctctgacgaggcccaagcccgcgctgcgttcagcctgattcaggagaacgaagtcctgtttacaatgtgcttcatccccctcgtttgttggattgtgtgcaccgggctgaaacagcaaatggagtccggaaagagccttgcccagacgtctaaaacaaccacagctgtgtacgtctttttcctgtccagcctcctgcagccccggggcggctctcaggaacacgggctgtgcgcccacctttggggactctgtagcctggccgctgacggcatctggaaccaaaagattctgtttgaggagtccgatctcagaaatcatgggctgcagaaggccgacgtgtctgcgttccttcgcatgaacctgtttcagaaagaagttgattgcgagaagttctatagctttatccacatgaccttccaggaatttttcgctgccatgtactatctcctggaggaagagaaagagggacggaccaatgtgcctggctccagactgaagctgccgagccgggacgtcacagtgctcctggaaaactacgggaaatttgagaagggatacctgatcttcgttgtgcgcttcctctttggcctggtcaatcaagaaagaacgtcttatcttgagaagaaactgtcctgtaagattagccagcagatccggctcgaactgctgaaatggattgaggtgaaggccaaagctaagaaacttcagatccaaccctctcagctcgagctgttctactgcctgtatgaaatgcaggaggaagattttgtccagagagccatggactacttccctaagattgagatcaacctctccacccgcatggatcatatggtgagctccttttgtattgaaaattgccaccgggttgagtctctgagccttggcttcctgcataacatgcccaaggaggaagaggaagaggagaaagaagggagacacctcgacatggtgcaatgtgtcctgccttcctctagccacgctgcctgctcccatggactggtgaacagccaccttacatcttccttttgtcgcggcctcttcagcgttctgtctacctcccagagcctgacagagctcgatctgtctgacaatagccttggggatcccggaatgagagtgctgtgcgaaaccctccagcatccgggctgtaacatccggcgcctgtggctggggagatgcggcctttcccacgagtgctgttttgacatcagcctggtcctctcttccaatcaaaagctggtggaactcgatctgagcgacaacgcgcttggagacttcggcattcggctgctctgcgtggggctgaaacaccttctttgtaatctgaagaaactctggctggtttcctgctgtctcacgtctgcctgctgtcaggatctggctagcgtcctttccacatctcatagcctgacccgcctctatgtgggagagaacgccctgggcgactccggggtggctatcctgtgcgagaaggccaagaatcctcagtgtaaccttcagaaactgggactcgtcaattctggcctgaccagcgtgtgctgttccgcgctcagctctgttctgtccacaaaccaaaatcttacccacctgtacctgagagggaacacactcggcgataagggaattaaactgctttgcgaaggcctgctccatcccgactgcaagctccaggtgctggagctggataattgtaaccttacgagccactgctgttgggacctgtctaccctgctcacatccagccagtctctgcggaaactttccctggggaataacgatctcggagacctgggcgtcatgatgttttgcgaagtgctcaagcagcaaagctgtctgcttcagaacctggggctgtccgagatgtatttcaattacgaaaccaagagcgccctcgagacactgcaggaggaaaaacctgagcttaccgttgtgtttgaaccctcttggtga

SEQ ID NO: 9074 - protein, 994 aa, synthetic construct
  REGION 1..994: note = NALP4__Homo_sapiens__Q96MN2
MAASFFSDFGLMWYLEELKKEEFRKFKEHLKQMTLQLELKQIPWTEVKKASREELANLLIKHYEEQQAWNITLRIFQKMDRKDLCMKVMRERTGYTKTYQAHAKQKFSRLWSSKSVTEIHLYFEEEVKQEECDHLDRLFAPKEAGKQPRTVIIQGPQGIGKTTLLMKLMMAWSDNKIFRDRFLYTFYFCCRELRELPPTSLADLISREWPDPAAPITEIVSQPERLLFVIDSFEELQGGLNEPDSDLCGDLMEKRPVQVLLSSLLRKKMLPEASLLIAIKPVCPKELRDQVTISEIYQPRGFNESDRLVYFCCFFKDPKRAMEAFNLVRESEQLFSICQIPLLCWILCTSLKQEMQKGKDLALTCQSTTSVYSSFVFNLFTPEGAEGPTPQTQHQLKALCSLAAEGMWTDTFEFCEDDLRRNGVVDADIPALLGTKILLKYGERESSYVFLHVCIQEFCAALFYLLKSHLDHPHPAVRCVQELLVANFEKARRAHWIFLGCFLTGLLNKKEQEKLDAFFGFQLSQEIKQQIHQCLKSLGERGNPQGQVDSLAIFYCLFEMQDPAFVKQAVNLLQEANFHIIDNVDLVVSAYCLKYCSSLRKLCFSVQNVFKKEDEHSSTSDYSLICWHHICSVLTTSGHLRELQVQDSTLSESTFVTWCNQLRHPSCRLQKLGINNVSFSGQSVLLFEVLFYQPDLKYLSFTLTKLSRDDIRSLCDALNYPAGNVKELALVNCHLSPIDCEVLAGLLTNNKKLTYLNVSCNQLDTGVPLLCEALCSPDTVLVYLMLAFCHLSEQCCEYISEMLLRNKSVRYLDLSANVLKDEGLKTLCEALKHPDCCLDSLCLVKCFITAAGCEDLASALISNQNLKILQIGCNEIGDVGVQLLCRALTHTDCRLEILGLEECGLTSTCCKDLASVLTCSKTLQQLNLTLNTLDHTGVVVLCEALRHPECALQVLGLRKTDFDEETQALLTAEEERNPNLTITDDCDTITRVEI

SEQ ID NO: 9075 - RNA, 2985 nt, synthetic construct
  misc_feature 1..2985: note = NALP4__Homo_sapiens__CCDS12936.1
  source 1..2985: mol_type = other RNA
atggcagcctctttcttctctgattttggtcttatgtggtatctggaggagctcaaaaaggaggagttcaggaaatttaaagaacatctcaagcaaatgactttgcagcttgaactcaagcagattccctggactgaggtcaaaaaagcatcccgggaagaacttgcaaacctcttgatcaagcactatgaagaacaacaagcttggaacataaccttaagaatctttcaaaagatggatagaaaggatctctgcatgaaggtcatgagggagagaacaggatacacaaagacctatcaagctcacgcaaagcagaaattcagccgcttatggtccagcaagtctgtcactgagattcacctatactttgaggaggaagtcaagcaagaagaatgtgaccatttggaccgcctttttgctcccaaggaagctgggaaacagccacgtacagtgatcattcaaggaccacaaggaattggaaaaacgacactcctgatgaagctgatgatggcctggtcggacaacaagatctttcgggataggttcctgtacacgttctatttctgctgcagagaactgagggagttgccgccaacgagtttggctgacttgatttccagagagtggcctgaccccgctgctcctataacagagatcgtgtctcaaccggagagactcttgttcgtcatcgacagcttcgaagagctgcagggcggcttgaacgaacccgattcggatctgtgtggtgacttgatggagaaacggccggtgcaggtgcttctgagcagtttgctgaggaagaagatgctcccggaggcctccctgctcatcgctatcaaacccgtgtgcccgaaggagctccgggatcaggtgacgatctcagaaatctaccagccccggggattcaacgagagtgataggttagtgtatttctgctgtttcttcaaagacccgaaaagagccatggaagccttcaatcttgtaagagaaagtgaacagctgttttccatatgccaaatcccgctcctctgctggatcctgtgtaccagtctgaagcaagagatgcagaaaggaaaagacctggccctgacctgccagagcactacctctgtgtactcctctttcgtctttaacctgttcacacctgagggtgccgagggcccgactccgcaaacccagcaccagctgaaggccctgtgctccctggctgcagagggtatgtggacagacacatttgagttttgtgaagacgacctccggagaaatggggttgttgacgctgacatccctgcgctgctgggcaccaagatacttctgaagtacggggagcgtgagagctcctacgtgttcctccacgtgtgtatccaggagttctgtgccgccttgttctatttgctcaagagccaccttgatcatcctcacccagctgtgagatgtgtacaggaattgctagttgccaattttgaaaaagcaaggagagcacattggatttttttggggtgttttctaactggccttttaaataaaaaggaacaagaaaaactggatgcgttttttggcttccaactgtcccaagagataaagcagcaaattcaccagtgcctgaagagcttaggggagcgtggcaatcctcagggacaggtggattccttggcgatattttactgtctctttgaaatgcaggatcctgcctttgtgaagcaggcagtgaacctcctccaagaagctaactttcatattattgacaacgtggacttggtggtttctgcctactgcttaaaatactgctccagcttgaggaaactctgtttttccgttcaaaatgtctttaagaaagaggatgaacacagctctacgtcggattacagcctcatctgttggcatcacatctgctctgtgctcaccaccagcgggcacctcagagagctccaggtgcaggacagcaccctcagcgagtcgacctttgtgacctggtgtaaccagctgaggcatcccagctgtcgccttcagaagcttggaataaataacgtttccttttctggccagagtgttctgctctttgaggtgctcttttatcagccagacttgaaatacctgagcttcaccctcacgaaactctctcgtgatgacatcaggtccctctgtgatgccttgaactacccagcaggcaacgtcaaagagctagcgctggtaaattgtcacctctcacccattgattgtgaagtccttgctggccttctaaccaacaacaagaagctgacgtatctgaatgtatcctgcaaccagttagacacaggcgtgccccttttgtgtgaagccctgtgcagcccagacacggtcctggtatacctgatgttggctttctgccacctcagcgagcagtgctgcgaatacatctctgaaatgcttctgcgtaacaagagcgtgcgctatctagacctcagtgccaatgtcctgaaggacgaaggactgaaaactctctgcgaggccttgaaacatccggactgctgcctggattcactgtgtttggtaaaatgttttatcactgctgctggctgtgaagacctcgcctctgctctcatcagcaatcaaaacctgaagattctgcaaattgggtgcaatgaaatcggagatgtgggtgtgcagctgttgtgtcgggctctgacgcatacggattgccgcttagagattcttgggttggaagaatgtgggttaacgagcacctgctgtaaggatctcgcgtctgttctcacctgcagtaagaccctgcagcagctcaacctgaccttgaacaccttggaccacacaggggtggttgtactctgtgaggccctgagacacccagagtgtgccctgcaggtgctcgggctgagaaaaactgattttgatgaggaaacccaggcacttctgacggctgaggaagagagaaatcctaacctgaccatcacagacgactgtgacacaatcacaagggtagagatctga

SEQ ID NO: 9076 - RNA, 2985 nt, synthetic construct
  misc_feature 1..2985: note = derived and/or modified sequence opt1 fromNALP4__Homo_sapiens__CCDS12936.1
  source 1..2985: mol_type = other RNA
atggccgccagcttcttctccgacttcggcctgatgtggtacctcgaggagctgaagaaggaggagttccgcaagttcaaggagcacctgaagcagatgaccctccagctggagctgaagcagatcccctggaccgaggtgaagaaggcgagccgggaggagctcgccaacctgctgatcaagcactacgaggagcagcaggcctggaacatcacgctccgcatcttccagaagatggaccggaaggacctgtgcatgaaggtcatgcgcgagcggaccgggtacaccaagacctaccaggcccacgccaagcagaagttctcccgcctgtggagctccaagagcgtgacggagatccacctctacttcgaggaggaggtgaagcaggaggagtgcgaccacctggaccggctgttcgcgccgaaggaggccggcaagcagccccgcaccgtcatcatccaggggccccagggcatcgggaagaccaccctcctgatgaagctgatgatggcctggtccgacaacaagatcttccgggaccgcttcctctacacgttctacttctgctgccgggagctgcgcgagctgcccccgaccagcctcgccgacctgatctcccgggagtggcccgaccccgcggcccccatcaccgagatcgtgagccagccggagcgcctcctcttcgtgatcgactccttcgaggagctgcagggcggcctgaacgagcccgacagcgacctctgcggggacctgatggagaagcggcccgtccaggtgctgctctccagcctgctgcgcaagaagatgctccccgaggcctccctgctgatcgccatcaagccggtgtgccccaaggagctccgggaccaggtcaccatcagcgagatctaccagccccgcggcttcaacgagtccgaccggctggtgtacttctgctgcttcttcaaggaccccaagcgcgccatggaggcgttcaacctggtgcgggagagcgagcagctgttctccatctgccagatcccgctgctgtgctggatcctctgcacgagcctgaagcaggagatgcagaaggggaaggacctggccctgacctgccagagcaccacctccgtctacagctccttcgtgttcaacctgttcacgcccgagggcgccgaggggcccacgccccagacccagcaccagctgaaggccctctgcagcctggccgcggagggcatgtggaccgacaccttcgagttctgcgaggacgacctgcgccgcaacggcgtggtcgacgccgacatcccggccctgctcgggaccaagatcctgctgaagtacggcgagcgggagtccagctacgtgttcctccacgtgtgcatccaggagttctgcgccgccctgttctacctgctcaagtcccacctggaccacccccaccccgcggtccgctgcgtgcaggagctgctcgtggccaacttcgagaaggcccggcgcgcccactggatcttcctggggtgcttcctgaccggcctcctgaacaagaaggagcaggagaagctggacgccttcttcggcttccagctcagccaggagatcaagcagcagatccaccagtgcctgaagtccctgggggagcggggcaacccccaggggcaggtcgacagcctcgcgatcttctactgcctgttcgagatgcaggacccggccttcgtgaagcaggccgtgaacctgctccaggaggccaacttccacatcatcgacaacgtcgacctggtggtctccgcgtactgcctgaagtactgcagctccctccgcaagctgtgcttcagcgtgcagaacgtgttcaagaaggaggacgagcactccagcacctccgactacagcctgatctgctggcaccacatctgctccgtcctcacgaccagcggccacctccgggagctccaggtgcaggacagcaccctctccgagagcaccttcgtgacgtggtgcaaccagctgcgccacccctcctgccggctgcagaagctcgggatcaacaacgtcagcttctccggccagagcgtgctgctgttcgaggtgctgttctaccagcccgacctgaagtacctgtccttcaccctcaccaagctgagccgcgacgacatccggtccctgtgcgacgccctcaactaccccgccggcaacgtcaaggagctggccctggtgaactgccacctcagcccgatcgactgcgaggtgctggccgggctgctcaccaacaacaagaagctgacgtacctgaacgtctcctgcaaccagctcgacaccggcgtgcccctgctgtgcgaggcgctctgcagccccgacaccgtgctggtctacctgatgctcgccttctgccacctgtccgagcagtgctgcgagtacatcagcgagatgctgctccgcaacaagtccgtgcggtacctggacctgagcgccaacgtgctcaaggacgaggggctgaagaccctgtgcgaggccctcaagcacccggactgctgcctggactccctgtgcctcgtcaagtgcttcatcacggccgcgggctgcgaggacctggccagcgccctgatcagcaaccagaacctcaagatcctgcagatcgggtgcaacgagatcggcgacgtgggcgtgcagctgctctgccgcgccctgacccacaccgactgccggctggagatcctcgggctggaggagtgcggcctgacctccacgtgctgcaaggacctcgccagcgtcctgacctgctccaagaccctgcagcagctcaacctgaccctgaacaccctcgaccacacgggggtggtggtcctgtgcgaggcgctgcgccaccccgagtgcgccctccaggtgctgggcctgcggaagaccgacttcgacgaggagacccaggccctcctgaccgccgaggaggagcgcaaccccaacctgacgatcaccgacgactgcgacaccatcacccgggtggagatctga

SEQ ID NO: 9077 - RNA, 2985 nt, synthetic construct
  misc_feature 1..2985: note = derived and/or modified sequence opt2 fromNALP4__Homo_sapiens__CCDS12936.1
  source 1..2985: mol_type = other RNA
atggccgcctccttcttctccgacttcggcctcatgtggtacctcgaggagctcaagaaggaggagttccgcaagttcaaggagcacctcaagcagatgaccctccagctcgagctcaagcagatcccctggaccgaggtcaagaaggcctcccgcgaggagctcgccaacctcctcatcaagcactacgaggagcagcaggcctggaacatcaccctccgcatcttccagaagatggaccgcaaggacctctgcatgaaggtcatgcgcgagcgcaccggctacaccaagacctaccaggcccacgccaagcagaagttctcccgcctctggtcctccaagtccgtcaccgagatccacctctacttcgaggaggaggtcaagcaggaggagtgcgaccacctcgaccgcctcttcgcccccaaggaggccggcaagcagccccgcaccgtcatcatccagggcccccagggcatcggcaagaccaccctcctcatgaagctcatgatggcctggtccgacaacaagatcttccgcgaccgcttcctctacaccttctacttctgctgccgcgagctccgcgagctcccccccacctccctcgccgacctcatctcccgcgagtggcccgaccccgccgcccccatcaccgagatcgtctcccagcccgagcgcctcctcttcgtcatcgactccttcgaggagctccagggcggcctcaacgagcccgactccgacctctgcggcgacctcatggagaagcgccccgtccaggtcctcctctcctccctcctccgcaagaagatgctccccgaggcctccctcctcatcgccatcaagcccgtctgccccaaggagctccgcgaccaggtcaccatctccgagatctaccagccccgcggcttcaacgagtccgaccgcctcgtctacttctgctgcttcttcaaggaccccaagcgcgccatggaggccttcaacctcgtccgcgagtccgagcagctcttctccatctgccagatccccctcctctgctggatcctctgcacctccctcaagcaggagatgcagaagggcaaggacctcgccctcacctgccagtccaccacctccgtctactcctccttcgtcttcaacctcttcacccccgagggcgccgagggccccaccccccagacccagcaccagctcaaggccctctgctccctcgccgccgagggcatgtggaccgacaccttcgagttctgcgaggacgacctccgccgcaacggcgtcgtcgacgccgacatccccgccctcctcggcaccaagatcctcctcaagtacggcgagcgcgagtcctcctacgtcttcctccacgtctgcatccaggagttctgcgccgccctcttctacctcctcaagtcccacctcgaccacccccaccccgccgtccgctgcgtccaggagctcctcgtcgccaacttcgagaaggcccgccgcgcccactggatcttcctcggctgcttcctcaccggcctcctcaacaagaaggagcaggagaagctcgacgccttcttcggcttccagctctcccaggagatcaagcagcagatccaccagtgcctcaagtccctcggcgagcgcggcaacccccagggccaggtcgactccctcgccatcttctactgcctcttcgagatgcaggaccccgccttcgtcaagcaggccgtcaacctcctccaggaggccaacttccacatcatcgacaacgtcgacctcgtcgtctccgcctactgcctcaagtactgctcctccctccgcaagctctgcttctccgtccagaacgtcttcaagaaggaggacgagcactcctccacctccgactactccctcatctgctggcaccacatctgctccgtcctcaccacctccggccacctccgcgagctccaggtccaggactccaccctctccgagtccaccttcgtcacctggtgcaaccagctccgccacccctcctgccgcctccagaagctcggcatcaacaacgtctccttctccggccagtccgtcctcctcttcgaggtcctcttctaccagcccgacctcaagtacctctccttcaccctcaccaagctctcccgcgacgacatccgctccctctgcgacgccctcaactaccccgccggcaacgtcaaggagctcgccctcgtcaactgccacctctcccccatcgactgcgaggtcctcgccggcctcctcaccaacaacaagaagctcacctacctcaacgtctcctgcaaccagctcgacaccggcgtccccctcctctgcgaggccctctgctcccccgacaccgtcctcgtctacctcatgctcgccttctgccacctctccgagcagtgctgcgagtacatctccgagatgctcctccgcaacaagtccgtccgctacctcgacctctccgccaacgtcctcaaggacgagggcctcaagaccctctgcgaggccctcaagcaccccgactgctgcctcgactccctctgcctcgtcaagtgcttcatcaccgccgccggctgcgaggacctcgcctccgccctcatctccaaccagaacctcaagatcctccagatcggctgcaacgagatcggcgacgtcggcgtccagctcctctgccgcgccctcacccacaccgactgccgcctcgagatcctcggcctcgaggagtgcggcctcacctccacctgctgcaaggacctcgcctccgtcctcacctgctccaagaccctccagcagctcaacctcaccctcaacaccctcgaccacaccggcgtcgtcgtcctctgcgaggccctccgccaccccgagtgcgccctccaggtcctcggcctccgcaagaccgacttcgacgaggagacccaggccctcctcaccgccgaggaggagcgcaaccccaacctcaccatcaccgacgactgcgacaccatcacccgcgtcgagatctga

SEQ ID NO: 9078 - RNA, 2985 nt, synthetic construct
  misc_feature 1..2985: note = derived and/or modified sequence opt3 fromNALP4__Homo_sapiens__CCDS12936.1
  source 1..2985: mol_type = other RNA
atggccgctagcttcttttccgacttcggcctgatgtggtacctcgaggaacttaagaaagaggaatttagaaagttcaaagagcacctgaagcagatgaccttgcaattagaactgaaacagatcccctggacagaggtgaagaaggcatctagggaggaactagccaacctcctgattaaacattatgaggaacagcaggcgtggaatataactcttcggatctttcaaaagatggatcgcaaagacctgtgcatgaaggtcatgcgagagcgtacggggtacaccaaaacatatcaggctcacgccaagcagaagttctcaagattgtggagtagcaaatccgttactgagattcatctctactttgaagaggaagtgaagcaggaggaatgtgatcacctggacaggctgttcgcacctaaagaggccggaaagcaaccacggaccgtaatcattcagggtccgcagggcatcgggaaaacaaccctcttaatgaagctgatgatggcttggtctgataacaaaatatttcgcgacagattcctttatactttttacttctgctgtagggagttgcgggaactgccccctacatcgctagcagatctcatctcacgcgagtggccagaccccgccgctcctattaccgaaatcgtgagccagccagagcgactgctttttgtcattgatagtttcgaagaactgcaaggaggcttgaatgagcccgactccgatctctgcggtgacctgatggaaaagagacctgtgcaggttttactgtctagcctccttaggaagaaaatgctgccagaggcctccttgctaatcgcgataaagccggtgtgtcccaaagaactgcgggatcaggtcacgatttcagagatctatcaacctcgtgggttcaacgaaagtgaccgcctcgtgtacttttgctgtttctttaaggacccaaaaagagcaatggaggccttcaatctggtaagggagagcgaacagctcttttctatttgccagatccccctgttgtgttggatcctctgcacttccctgaagcaggagatgcaaaagggaaaagatttagctctgacctgtcagtcaacaactagcgtttacagttctttcgtgtttaacctattcacccctgaaggcgccgagggcccaacaccccagacccagcatcaactcaaggcactgtgctcccttgctgccgaggggatgtggacggacacttttgaattttgcgaggatgacttgcggcgaaatggagtcgtggatgcggacattccggccctgctcggtacaaaaatactgcttaagtatggcgaacgcgagagctcgtacgtgtttctgcacgtctgtatccaggagttctgcgcagctttgttttatctcctgaaatctcacttagatcatcctcaccccgccgttagatgtgtgcaggagctgctagtagctaacttcgagaaggccaggcgggcacattggattttcctcgggtgctttctgaccggacttttgaataagaaagaacaggagaagctggacgccttctttggcttccaactctcccaggaaatcaaacagcagatacaccaatgtctgaagtcattaggtgagcgcgggaacccacagggacaggtggatagtctggctattttctactgccttttcgaaatgcaagaccctgcgtttgtcaaacaggcagtgaatttgctccaggaggccaacttccacatcatcgataatgttgacctggtggtcagcgcttattgtctaaagtactgctcctctctgagaaagctctgttttagcgtgcagaacgtattcaaaaaggaggacgaacattcaagtacttccgattatagcctgatttgctggcaccatatctgttctgttcttacaacctcaggccacttgagggagctgcaagtgcaggacagtacgttaagcgaatccacctttgtcacatggtgcaatcagctccgtcatccctcttgccggctgcagaaacttggcattaacaacgtgtcgttcagcgggcaatccgtcctgttgtttgaggtgcttttctaccagccagatctgaagtacctatcattcactctgaccaaactcagtcgagacgatataagatctctgtgtgacgcccttaattatcccgcaggaaacgttaaggaattggccctggtgaattgccacttaagccctatcgattgtgaggtactcgctggtctgcttacaaacaataaaaagctgacttacctaaacgtctcctgcaatcagctcgacaccggcgtgccactgttgtgtgaggccctgtgctcaccggatacagttttagtgtatctcatgctggcattttgtcaccttagcgaacagtgctgtgagtacatttctgaaatgctgttgaggaacaagtccgtccgctatctcgacctgagtgcgaatgtgctaaaagatgaggggctgaagaccctttgcgaggctctcaaacatcccgactgttgcctggatagcttgtgcctggtaaagtgtttcatcactgccgcaggatgcgaagacttagcctctgctctcatctccaaccaaaatctgaaaattcttcagataggctgtaacgagatcggtgacgtgggggttcagctgttgtgccgggccctcacgcacacagattgtagactggaaattctaggcctggaggaatgcggacttacctcaacttgttgcaaggacctcgcaagtgtcctgacctgtagcaagacattgcaacagttaaatctgaccctcaacactctggatcatacaggcgtggtggtcctttgcgaggctctgaggcaccctgagtgtgccttgcaggttctagggctgcgcaaaacggactttgatgaagagacccaggcgctcctgactgccgaagaggaacgaaatccaaaccttacaatcaccgacgattgcgacacaattactcgggtggagatctga

SEQ ID NO: 9079 - RNA, 2985 nt, synthetic construct
  misc_feature 1..2985: note = derived and/or modified sequence opt4 fromNALP4__Homo_sapiens__CCDS12936.1
  source 1..2985: mol_type = other RNA
atggccgccagcttcttcagcgacttcggcctgatgtggtacctggaggagctgaagaaggaggagttcagaaagttcaaggagcacctgaagcagatgaccctgcagctggagctgaagcagatcccctggaccgaggtgaagaaggccagcagagaggagctggccaacctgctgatcaagcactacgaggagcagcaggcctggaacatcaccctgagaatcttccagaagatggacagaaaggacctgtgcatgaaggtgatgagagagagaaccggctacaccaagacctaccaggcccacgccaagcagaagttcagcagactgtggagcagcaagagcgtgaccgagatccacctgtacttcgaggaggaggtgaagcaggaggagtgcgaccacctggacagactgttcgcccccaaggaggccggcaagcagcccagaaccgtgatcatccagggcccccagggcatcggcaagaccaccctgctgatgaagctgatgatggcctggagcgacaacaagatcttcagagacagattcctgtacaccttctacttctgctgcagagagctgagagagctgccccccaccagcctggccgacctgatcagcagagagtggcccgaccccgccgcccccatcaccgagatcgtgagccagcccgagagactgctgttcgtgatcgacagcttcgaggagctgcagggcggcctgaacgagcccgacagcgacctgtgcggcgacctgatggagaagagacccgtgcaggtgctgctgagcagcctgctgagaaagaagatgctgcccgaggccagcctgctgatcgccatcaagcccgtgtgccccaaggagctgagagaccaggtgaccatcagcgagatctaccagcccagaggcttcaacgagagcgacagactggtgtacttctgctgcttcttcaaggaccccaagagagccatggaggccttcaacctggtgagagagagcgagcagctgttcagcatctgccagatccccctgctgtgctggatcctgtgcaccagcctgaagcaggagatgcagaagggcaaggacctggccctgacctgccagagcaccaccagcgtgtacagcagcttcgtgttcaacctgttcacccccgagggcgccgagggccccaccccccagacccagcaccagctgaaggccctgtgcagcctggccgccgagggcatgtggaccgacaccttcgagttctgcgaggacgacctgagaagaaacggcgtggtggacgccgacatccccgccctgctgggcaccaagatcctgctgaagtacggcgagagagagagcagctacgtgttcctgcacgtgtgcatccaggagttctgcgccgccctgttctacctgctgaagagccacctggaccacccccaccccgccgtgagatgcgtgcaggagctgctggtggccaacttcgagaaggccagaagagcccactggatcttcctgggctgcttcctgaccggcctgctgaacaagaaggagcaggagaagctggacgccttcttcggcttccagctgagccaggagatcaagcagcagatccaccagtgcctgaagagcctgggcgagagaggcaacccccagggccaggtggacagcctggccatcttctactgcctgttcgagatgcaggaccccgccttcgtgaagcaggccgtgaacctgctgcaggaggccaacttccacatcatcgacaacgtggacctggtggtgagcgcctactgcctgaagtactgcagcagcctgagaaagctgtgcttcagcgtgcagaacgtgttcaagaaggaggacgagcacagcagcaccagcgactacagcctgatctgctggcaccacatctgcagcgtgctgaccaccagcggccacctgagagagctgcaggtgcaggacagcaccctgagcgagagcaccttcgtgacctggtgcaaccagctgagacaccccagctgcagactgcagaagctgggcatcaacaacgtgagcttcagcggccagagcgtgctgctgttcgaggtgctgttctaccagcccgacctgaagtacctgagcttcaccctgaccaagctgagcagagacgacatcagaagcctgtgcgacgccctgaactaccccgccggcaacgtgaaggagctggccctggtgaactgccacctgagccccatcgactgcgaggtgctggccggcctgctgaccaacaacaagaagctgacctacctgaacgtgagctgcaaccagctggacaccggcgtgcccctgctgtgcgaggccctgtgcagccccgacaccgtgctggtgtacctgatgctggccttctgccacctgagcgagcagtgctgcgagtacatcagcgagatgctgctgagaaacaagagcgtgagatacctggacctgagcgccaacgtgctgaaggacgagggcctgaagaccctgtgcgaggccctgaagcaccccgactgctgcctggacagcctgtgcctggtgaagtgcttcatcaccgccgccggctgcgaggacctggccagcgccctgatcagcaaccagaacctgaagatcctgcagatcggctgcaacgagatcggcgacgtgggcgtgcagctgctgtgcagagccctgacccacaccgactgcagactggagatcctgggcctggaggagtgcggcctgaccagcacctgctgcaaggacctggccagcgtgctgacctgcagcaagaccctgcagcagctgaacctgaccctgaacaccctggaccacaccggcgtggtggtgctgtgcgaggccctgagacaccccgagtgcgccctgcaggtgctgggcctgagaaagaccgacttcgacgaggagacccaggccctgctgaccgccgaggaggagagaaaccccaacctgaccatcaccgacgactgcgacaccatcaccagagtggagatctga

SEQ ID NO: 9080 - RNA, 2985 nt, synthetic construct
  misc_feature 1..2985: note = derived and/or modified sequence opt5 fromNALP4__Homo_sapiens__CCDS12936.1
  source 1..2985: mol_type = other RNA
atggccgctagcttcttttccgacttcggcctgatgtggtacctcgaggaactgaagaaagaggaatttagaaagttcaaagagcaccttaagcagatgaccctgcaactcgaactgaaacagatcccctggacagaggtgaagaaggcctctcgggaggaacttgcgaacctgctcattaaacattatgaggaacagcaggcttggaatatcacgctgcgcatttttcaaaagatggatagaaaagacctgtgcatgaaggtcatgcgggagcgcaccgggtacacaaaaacctatcaggcccacgccaagcagaagttcagcagactctggtcctctaaaagcgttacagagatccatctgtactttgaagaggaagtgaagcaggaggaatgtgatcaccttgaccggctgttcgctcctaaagaggccggaaagcaaccgcgcaccgtgattatccagggcccccaggggatcggaaaaacaaccctcctgatgaagctcatgatggcttggtccgataacaaaatttttagagaccggttcctgtatacgttttacttctgctgtcgcgagctcagagaactgcctcccacctctctggccgatctcatcagccgggagtggcctgaccccgcggcccctattacagaaatcgtctcccagccggagcgcctgctttttgtgattgatagcttcgaggaactgcaaggcgggctcaatgagcccgactctgatctgtgcggagaccttatggaaaagagacctgttcaggtgctgctctccagcctgctgcggaagaaaatgctccccgaggcttctctgcttatcgccattaagcctgtctgtcccaaagaactgcgcgatcaggtgaccatctccgagatctatcaaccgagaggcttcaacgaaagcgaccggctcgtttacttttgctgtttctttaaggaccctaaaagagctatggaggccttcaatctggtgcgcgagtctgaacagcttttctccatttgccagatccccctgctctgttggattctgtgcacaagcctgaagcaggagatgcaaaagggcaaagatctcgcgctgacctgtcagtccacgacatctgtctacagctccttcgtgtttaaccttttcacccctgaaggggccgagggacccacaccccagacccagcatcaactgaaggctctctgcagcctggccgctgagggcatgtggaccgacacatttgaattttgcgaggatgacctgcggagaaatggggtggtcgatgccgacatccctgcccttctcggaacgaaaattctgctgaagtatggcgaacgcgagtcttcctacgtttttctccacgtgtgtatccaggaattttgcgctgcgctgttttatcttctgaaaagccacctcgatcatccgcaccccgccgtgcggtgtgtccaggagctgctggtggctaacttcgagaaggccagacgcgcccattggatcttccttgggtgctttctcaccggactgctgaataagaaagaacaggagaagctcgacgctttctttggcttccaactgtctcaggaaattaaacagcagatccaccaatgtcttaagagcctgggcgagcgggggaaccctcagggacaggttgattccctcgccattttctactgcctgttcgaaatgcaagaccccgcgtttgtgaaacaggctgtcaatctgcttcaggaggccaacttccacatcattgataatgtggacctcgttgtgtctgcctattgtctgaagtactgcagctccctgagaaagctctgttttagcgtccagaacgtgttcaaaaaggaggacgaacattcttccacaagcgattattctctgatctgctggcaccatatctgttccgtccttaccacaagcggccatctgcgcgagctccaagtgcaggactccaccctgtctgaaagcacgtttgttacatggtgcaatcagctgcggcacccttcctgcagacttcagaaactcgggattaacaacgtgtctttcagcggacaatccgtcctgctgtttgaggtgcttttctaccagcccgatctgaagtaccttagcttcaccctgaccaaactctctcgcgacgatatccggtccctgtgtgacgctctgaattatccggccggcaacgttaaggaacttgctctggtgaattgccacctcagccctattgattgtgaggtcctggccgggctcctgacaaacaataaaaagctgacctacctgaacgtgtcttgcaatcagctcgacacaggagtgcccctgctgtgtgaggcgctttgctcccctgatacggttctggtctatctcatgctggccttttgtcacctcagcgaacagtgctgtgagtacatctctgaaatgctgcttagaaacaagagcgtgcggtatctggacctctccgctaatgtgctgaaagatgagggcctgaagaccctttgcgaggccctgaaacatcccgactgttgcctcgatagcctgtgcctcgtcaagtgtttcattacagctgccggctgcgaagacctggcgtctgcccttatctccaaccaaaatctgaaaattctgcagatcgggtgtaacgagatcggagacgtgggcgttcagctcctgtgccgcgctcttacccacacagattgtagactggaaattctcgggctggaggaatgcggactcaccagcacgtgttgcaaggacctggcctccgtgcttacctgttctaagacactgcaacagctgaatctcaccctgaacacacttgatcataccggcgtcgtggttctgtgcgaggctctccggcaccctgagtgtgcccttcaggtgctcgggctgagaaaaacggactttgatgaagagacacaggcccttctgaccgctgaagaggaacgcaatcccaacctgacaatcaccgacgattgcgacaccattacacgggtcgagatctga

SEQ ID NO: 9081 - protein, 1200 aa, synthetic construct
  REGION 1..1200: note = NALP5__Homo_sapiens__P59047
MKVAGGLELGAAALLSASPRALVTLSTGPTCSILPKNPLFPQNLSSQPCIKMEGDKSLTFSSYGLQWCLYELDKEEFQTFKELLKKKSSESTTCSIPQFEIENANVECLALLLHEYYGASLAWATSISIFENMNLRTLSEKARDDMKRHSPEDPEATMTDQGPSKEKVPGISQAVQQDSATAAETKEQEISQAMEQEGATAAETEEQEISQAMEQEGATAAETEEQGHGGDTWDYKSHVMTKFAEEEDVRRSFENTAADWPEMQTLAGAFDSDRWGFRPRTVVLHGKSGIGKSALARRIVLCWAQGGLYQGMFSYVFFLPVREMQRKKESSVTEFISREWPDSQAPVTEIMSRPERLLFIIDGFDDLGSVLNNDTKLCKDWAEKQPPFTLIRSLLRKVLLPESFLIVTVRDVGTEKLKSEVVSPRYLLVRGISGEQRIHLLLERGIGEHQKTQGLRAIMNNRELLDQCQVPAVGSLICVALQLQDVVGESVAPFNQTLTGLHAAFVFHQLTPRGVVRRCLNLEERVVLKRFCRMAVEGVWNRKSVFDGDDLMVQGLGESELRALFHMNILLPDSHCEEYYTFFHLSLQDFCAALYYVLEGLEIEPALCPLYVEKTKRSMELKQAGFHIHSLWMKRFLFGLVSEDVRRPLEVLLGCPVPLGVKQKLLHWVSLLGQQPNATTPGDTLDAFHCLFETQDKEFVRLALNSFQEVWLPINQNLDLIASSFCLQHCPYLRKIRVDVKGIFPRDESAEACPVVPLWMRDKTLIEEQWEDFCSMLGTHPHLRQLDLGSSILTERAMKTLCAKLRHPTCKIQTLMFRNAQITPGVQHLWRIVMANRNLRSLNLGGTHLKEEDVRMACEALKHPKCLLESLRLDCCGLTHACYLKISQILTTSPSLKSLSLAGNKVTDQGVMPLSDALRVSQCALQKLILEDCGITATGCQSLASALVSNRSLTHLCLSNNSLGNEGVNLLCRSMRLPHCSLQRLMLNQCHLDTAGCGFLALALMGNSWLTHLSLSMNPVEDNGVKLLCEVMREPSCHLQDLELVKCHLTAACCESLSCVISRSRHLKSLDLTDNALGDGGVAALCEGLKQKNSVLARLGLKACGLTSDCCEALSLALSCNRHLTSLNLVQNNFSPKGMMKLCSAFACPTSNLQIIGLWKWQYPVQIRKLLEEVQLLKPRVVIDGSWHSFDEDDRYWWKN

SEQ ID NO: 9082 - RNA, 3603 nt, synthetic construct
  misc_feature 1..3603: note = NALP5__Homo_sapiens__CCDS12938.1
  source 1..3603: mol_type = other RNA
atgaaggttgcaggaggacttgaacttggagctgctgctctgctctcagcatcaccacgtgctcttgtcactctttccacaggtcctacttgctctatattaccaaagaatccacttttcccccaaaacctgagctctcagccttgtatcaagatggaaggagacaaatcgctcaccttttccagctacgggctgcaatggtgtctctatgagctagacaaggaagaatttcagacattcaaggaattactaaagaagaaatcttcagaatcgaccacatgctctattccacagtttgaaatcgagaatgccaacgtggaatgtctggcactcctcttgcatgagtattatggagcatcgctggcctgggctacgtccattagcatctttgaaaacatgaacctgcgaaccctctcggagaaggcacgggatgacatgaaaagacattcaccagaagatcctgaagcaacgatgactgaccaaggaccaagcaaggaaaaagtgccaggaatttcacaagctgtgcaacaagatagtgccacagctgcagagacaaaagaacaagaaatttcacaagctatggaacaagaaggtgccacagcagcagagacagaagaacaagaaatttcacaagctatggaacaagaaggtgccacagcagcagagacagaagaacaaggacatggaggtgacacatgggactacaagagtcacgtgatgaccaaattcgctgaggaggaggatgtacgtcgtagttttgaaaacactgctgctgactggccggaaatgcaaacgttggctggtgcttttgattcagaccggtggggcttccggcctcgcacggtggttctgcacggaaagtcaggaattgggaaatcggctctagccagaaggatcgtgctgtgctgggcgcaaggtggactctaccagggaatgttctcctacgtcttcttcctccccgttagagagatgcagcggaagaaggagagcagtgtcacagagttcatctccagggagtggccagactcccaggctccggtgacggagatcatgtcccgaccagaaaggctgttgttcatcattgacggtttcgatgacctgggctctgtcctcaacaatgacacaaagctctgcaaagactgggctgagaagcagcctccgttcaccctcatacgcagtctgctgaggaaggtcctgctccctgagtccttcctgatcgtcaccgtcagagacgtgggcacagagaagctcaagtcagaggtcgtgtctccccgttacctgttagttagaggaatctccggggaacaaagaatccacttgctccttgagcgcgggattggtgagcatcagaagacacaagggttgcgtgcgatcatgaacaaccgtgagctgctcgaccagtgccaggtgcccgccgtgggctctctcatctgcgtggccctgcagctgcaggacgtggtgggggagagcgtcgcccccttcaaccaaacgctcacaggcctgcacgccgcttttgtgtttcatcagctcacccctcgaggcgtggtccggcgctgtctcaatctggaggaaagagttgtcctgaagcgcttctgccgtatggctgtggagggagtgtggaataggaagtcagtgtttgacggtgacgacctcatggttcaaggactcggggagtctgagctccgtgctctgtttcacatgaacatccttctcccagacagccactgtgaggagtactacaccttcttccacctcagtctccaggacttctgtgccgccttgtactacgtgttagagggcctggaaatcgagccagctctctgccctctgtacgttgagaagacaaagaggtccatggagcttaaacaggcaggcttccatatccactcgctttggatgaagcgtttcttgtttggcctcgtgagcgaagacgtaaggaggccactggaggtcctgctgggctgtcccgttcccctgggggtgaagcagaagcttctgcactgggtctctctgttgggtcagcagcctaatgccaccaccccaggagacaccctggacgccttccactgtcttttcgagactcaagacaaagagtttgttcgcttggcattaaacagcttccaagaagtgtggcttccgattaaccagaacctggacttgatagcatcttccttctgcctccagcactgtccgtatttgcggaaaattcgggtggatgtcaaagggatcttcccaagagatgagtccgctgaggcatgtcctgtggtccctctatggatgcgggataagaccctcattgaggagcagtgggaagatttctgctccatgcttggcacccacccacacctgcggcagctggacctgggcagcagcatcctgacagagcgggccatgaagaccctgtgtgccaagctgaggcatcccacctgcaagatacagaccctgatgtttagaaatgcacagattacccctggtgtgcagcacctctggagaatcgtcatggccaaccgtaacctaagatccctcaacttgggaggcacccacctgaaggaagaggatgtaaggatggcgtgtgaagccttaaaacacccaaaatgtttgttggagtctttgaggctggattgctgtggattgacccatgcctgttacctgaagatctcccaaatccttacgacctcccccagcctgaaatctctgagcctggcaggaaacaaggtgacagaccagggagtaatgcctctcagtgatgccttgagagtctcccagtgcgccctgcagaagctgatactggaggactgtggcatcacagccacgggttgccagagtctggcctcagccctcgtcagcaaccggagcttgacacacctgtgcctatccaacaacagcctggggaacgaaggtgtaaatctactgtgtcgatccatgaggcttccccactgtagtctgcagaggctgatgctgaatcagtgccacctggacacggctggctgtggttttcttgcacttgcgcttatgggtaactcatggctgacgcacctgagccttagcatgaaccctgtggaagacaatggcgtgaagcttctgtgcgaggtcatgagagaaccatcttgtcatctccaggacctggagttggtaaagtgtcatctcaccgccgcgtgctgtgagagtctgtcctgtgtgatctcgaggagcagacacctgaagagcctggatctcacggacaatgccctgggtgacggtggggttgctgcgctgtgcgagggactgaagcaaaagaacagtgttctggcgagactcgggttgaaggcatgtggactgacttctgattgctgtgaggcactctccttggccctttcctgcaaccggcatctgaccagtctaaacctggtgcagaataacttcagtcccaaaggaatgatgaagctgtgttcggcctttgcctgtcccacgtctaacttacagataattgggctgtggaaatggcagtaccctgtgcaaataaggaagctgctggaggaagtgcagctactcaagccccgagtcgtaattgacggtagttggcattcttttgatgaagatgaccggtactggtggaaaaactga

SEQ ID NO: 9083 - RNA, 3603 nt, synthetic construct
  misc_feature 1..3603: note = derived and/or modified sequence opt1 fromNALP5__Homo_sapiens__CCDS12938.1
  source 1..3603: mol_type = other RNA
atgaaggtggccggcgggctggagctcggcgccgcggccctgctgagcgccagcccccgcgccctcgtcaccctgagcaccgggccgacgtgctccatcctgcccaagaaccccctcttcccccagaacctgagctcccagccgtgcatcaagatggagggcgacaagagcctgaccttctccagctacgggctccagtggtgcctgtacgagctggacaaggaggagttccagaccttcaaggagctcctgaagaagaagtccagcgagtccaccacgtgcagcatcccccagttcgagatcgagaacgccaacgtggagtgcctggcgctcctgctgcacgagtactacggcgcctccctcgcctgggccaccagcatctccatcttcgagaacatgaacctgcggaccctgagcgagaaggcgcgcgacgacatgaagcggcactcccccgaggaccccgaggccaccatgacggaccagggcccgagcaaggagaaggtgcccgggatctcccaggccgtccagcaggacagcgccaccgccgcggagaccaaggagcaggagatcagccaggccatggagcaggagggcgccaccgccgccgagacggaggagcaggagatctcccaggcgatggagcaggagggggccaccgccgccgagaccgaggagcagggccacgggggcgacacctgggactacaagagccacgtgatgacgaagttcgccgaggaggaggacgtgcgccggtccttcgagaacaccgcggccgactggcccgagatgcagaccctcgccggcgccttcgacagcgaccgctgggggttccggccccgcaccgtcgtgctgcacggcaagtccgggatcggcaagagcgccctggcgcggcgcatcgtgctctgctgggcccagggcgggctgtaccagggcatgttctcctacgtcttcttcctgccggtgcgggagatgcagcgcaagaaggagagctccgtgacggagttcatcagccgggagtggcccgactcccaggcccccgtcaccgagatcatgagccgccccgagcggctcctgttcatcatcgacgggttcgacgacctgggctccgtgctcaacaacgacaccaagctgtgcaaggactgggccgagaagcagccgcccttcaccctgatccgcagcctcctgcggaaggtgctgctccccgagtccttcctgatcgtcacggtgcgcgacgtggggaccgagaagctgaagtccgaggtcgtgagcccccggtacctcctggtgcgcggcatcagcggcgagcagcggatccacctcctgctggagcgcgggatcggcgagcaccagaagacccaggggctgcgcgcgatcatgaacaaccgggagctcctggaccagtgccaggtcccggccgtgggctccctgatctgcgtggccctccagctgcaggacgtcgtgggggagagcgtcgcccccttcaaccagaccctgacgggcctgcacgccgcgttcgtgttccaccagctcacgccccgcggcgtggtccggcgctgcctgaacctggaggagcgggtggtgctcaagcgcttctgccggatggccgtcgagggggtgtggaaccgcaagagcgtgttcgacggcgacgacctgatggtccaggggctgggcgagtccgagctccgggccctgttccacatgaacatcctgctccccgacagccactgcgaggagtactacaccttcttccacctgtccctgcaggacttctgcgccgccctctactacgtgctggaggggctggagatcgagccggcgctctgccccctgtacgtggagaagaccaagcgcagcatggagctgaagcaggccggcttccacatccactccctctggatgaagcggttcctgttcggcctggtcagcgaggacgtgcgccggcccctcgaggtgctgctggggtgccccgtcccgctcggcgtgaagcagaagctgctgcactgggtgtccctcctggggcagcagcccaacgccaccacccccggcgacaccctggacgccttccactgcctcttcgagacccaggacaaggagttcgtccgcctggccctgaacagcttccaggaggtgtggctcccgatcaaccagaacctggacctgatcgcgtccagcttctgcctccagcactgcccctacctgcggaagatccgcgtggacgtcaagggcatcttcccccgggacgagtccgccgaggcctgccccgtggtgccgctgtggatgcgcgacaagacgctcatcgaggagcagtgggaggacttctgcagcatgctggggacccacccccacctccggcagctggacctgggctccagcatcctgaccgagcgcgccatgaagaccctctgcgcgaagctgcgccacccgacctgcaagatccagacgctgatgttccggaacgcccagatcacccccggggtccagcacctctggcgcatcgtgatggccaaccggaacctgcgctccctgaacctcggcgggacccacctgaaggaggaggacgtgcggatggcctgcgaggccctgaagcaccccaagtgcctcctggagagcctgcgcctcgactgctgcggcctgacccacgcgtgctacctgaagatctcccagatcctcacgaccagccccagcctgaagtccctgagcctcgccggcaacaaggtcaccgaccagggggtgatgcccctgtccgacgccctgcgggtgagccagtgcgccctccagaagctgatcctggaggactgcggcatcaccgccacggggtgccagtccctcgcgagcgccctggtctccaaccgcagcctgacccacctctgcctgtccaacaacagcctgggcaacgagggggtgaacctcctgtgccggtccatgcgcctgccccactgcagcctccagcggctgatgctgaaccagtgccacctcgacaccgccggctgcggcttcctggccctggccctcatggggaactcctggctgacccacctgagcctctccatgaacccggtggaggacaacggcgtcaagctgctgtgcgaggtgatgcgcgagcccagctgccacctccaggacctggagctggtgaagtgccacctcacggcggcctgctgcgagtccctgagctgcgtcatctcccggagccgccacctgaagtccctggacctcaccgacaacgccctgggggacggcggggtggccgcgctgtgcgagggcctcaagcagaagaactccgtgctggcccggctgggcctcaaggcctgcgggctgaccagcgactgctgcgaggccctgtccctcgccctgagctgcaaccgccacctgacctccctcaacctggtccagaacaacttcagccccaagggcatgatgaagctgtgctccgcgttcgcctgccccacgagcaacctccagatcatcgggctgtggaagtggcagtacccggtgcagatccggaagctgctcgaggaggtgcagctgctgaagccccgcgtcgtgatcgacggctcctggcacagcttcgacgaggacgaccggtactggtggaagaactga

SEQ ID NO: 9084 - RNA, 3603 nt, synthetic construct
  misc_feature 1..3603: note = derived and/or modified sequence opt2 fromNALP5__Homo_sapiens__CCDS12938.1
  source 1..3603: mol_type = other RNA
atgaaggtcgccggcggcctcgagctcggcgccgccgccctcctctccgcctccccccgcgccctcgtcaccctctccaccggccccacctgctccatcctccccaagaaccccctcttcccccagaacctctcctcccagccctgcatcaagatggagggcgacaagtccctcaccttctcctcctacggcctccagtggtgcctctacgagctcgacaaggaggagttccagaccttcaaggagctcctcaagaagaagtcctccgagtccaccacctgctccatcccccagttcgagatcgagaacgccaacgtcgagtgcctcgccctcctcctccacgagtactacggcgcctccctcgcctgggccacctccatctccatcttcgagaacatgaacctccgcaccctctccgagaaggcccgcgacgacatgaagcgccactcccccgaggaccccgaggccaccatgaccgaccagggcccctccaaggagaaggtccccggcatctcccaggccgtccagcaggactccgccaccgccgccgagaccaaggagcaggagatctcccaggccatggagcaggagggcgccaccgccgccgagaccgaggagcaggagatctcccaggccatggagcaggagggcgccaccgccgccgagaccgaggagcagggccacggcggcgacacctgggactacaagtcccacgtcatgaccaagttcgccgaggaggaggacgtccgccgctccttcgagaacaccgccgccgactggcccgagatgcagaccctcgccggcgccttcgactccgaccgctggggcttccgcccccgcaccgtcgtcctccacggcaagtccggcatcggcaagtccgccctcgcccgccgcatcgtcctctgctgggcccagggcggcctctaccagggcatgttctcctacgtcttcttcctccccgtccgcgagatgcagcgcaagaaggagtcctccgtcaccgagttcatctcccgcgagtggcccgactcccaggcccccgtcaccgagatcatgtcccgccccgagcgcctcctcttcatcatcgacggcttcgacgacctcggctccgtcctcaacaacgacaccaagctctgcaaggactgggccgagaagcagccccccttcaccctcatccgctccctcctccgcaaggtcctcctccccgagtccttcctcatcgtcaccgtccgcgacgtcggcaccgagaagctcaagtccgaggtcgtctccccccgctacctcctcgtccgcggcatctccggcgagcagcgcatccacctcctcctcgagcgcggcatcggcgagcaccagaagacccagggcctccgcgccatcatgaacaaccgcgagctcctcgaccagtgccaggtccccgccgtcggctccctcatctgcgtcgccctccagctccaggacgtcgtcggcgagtccgtcgcccccttcaaccagaccctcaccggcctccacgccgccttcgtcttccaccagctcaccccccgcggcgtcgtccgccgctgcctcaacctcgaggagcgcgtcgtcctcaagcgcttctgccgcatggccgtcgagggcgtctggaaccgcaagtccgtcttcgacggcgacgacctcatggtccagggcctcggcgagtccgagctccgcgccctcttccacatgaacatcctcctccccgactcccactgcgaggagtactacaccttcttccacctctccctccaggacttctgcgccgccctctactacgtcctcgagggcctcgagatcgagcccgccctctgccccctctacgtcgagaagaccaagcgctccatggagctcaagcaggccggcttccacatccactccctctggatgaagcgcttcctcttcggcctcgtctccgaggacgtccgccgccccctcgaggtcctcctcggctgccccgtccccctcggcgtcaagcagaagctcctccactgggtctccctcctcggccagcagcccaacgccaccacccccggcgacaccctcgacgccttccactgcctcttcgagacccaggacaaggagttcgtccgcctcgccctcaactccttccaggaggtctggctccccatcaaccagaacctcgacctcatcgcctcctccttctgcctccagcactgcccctacctccgcaagatccgcgtcgacgtcaagggcatcttcccccgcgacgagtccgccgaggcctgccccgtcgtccccctctggatgcgcgacaagaccctcatcgaggagcagtgggaggacttctgctccatgctcggcacccacccccacctccgccagctcgacctcggctcctccatcctcaccgagcgcgccatgaagaccctctgcgccaagctccgccaccccacctgcaagatccagaccctcatgttccgcaacgcccagatcacccccggcgtccagcacctctggcgcatcgtcatggccaaccgcaacctccgctccctcaacctcggcggcacccacctcaaggaggaggacgtccgcatggcctgcgaggccctcaagcaccccaagtgcctcctcgagtccctccgcctcgactgctgcggcctcacccacgcctgctacctcaagatctcccagatcctcaccacctccccctccctcaagtccctctccctcgccggcaacaaggtcaccgaccagggcgtcatgcccctctccgacgccctccgcgtctcccagtgcgccctccagaagctcatcctcgaggactgcggcatcaccgccaccggctgccagtccctcgcctccgccctcgtctccaaccgctccctcacccacctctgcctctccaacaactccctcggcaacgagggcgtcaacctcctctgccgctccatgcgcctcccccactgctccctccagcgcctcatgctcaaccagtgccacctcgacaccgccggctgcggcttcctcgccctcgccctcatgggcaactcctggctcacccacctctccctctccatgaaccccgtcgaggacaacggcgtcaagctcctctgcgaggtcatgcgcgagccctcctgccacctccaggacctcgagctcgtcaagtgccacctcaccgccgcctgctgcgagtccctctcctgcgtcatctcccgctcccgccacctcaagtccctcgacctcaccgacaacgccctcggcgacggcggcgtcgccgccctctgcgagggcctcaagcagaagaactccgtcctcgcccgcctcggcctcaaggcctgcggcctcacctccgactgctgcgaggccctctccctcgccctctcctgcaaccgccacctcacctccctcaacctcgtccagaacaacttctcccccaagggcatgatgaagctctgctccgccttcgcctgccccacctccaacctccagatcatcggcctctggaagtggcagtaccccgtccagatccgcaagctcctcgaggaggtccagctcctcaagccccgcgtcgtcatcgacggctcctggcactccttcgacgaggacgaccgctactggtggaagaactga

SEQ ID NO: 9085 - RNA, 3603 nt, synthetic construct
  misc_feature 1..3603: note = derived and/or modified sequence opt3 fromNALP5__Homo_sapiens__CCDS12938.1
  source 1..3603: mol_type = other RNA
atgaaggtggccggcgggctggagctcggagctgcagcccttctgagcgcgtcccccagagctttggtcaccttatctacaggtcctacttgctcaatcctgcccaaaaacccgctattcccccagaatctcagtagccaaccttgtattaagatggaaggcgacaaatccctgacgttttcttcgtacgggcttcagtggtgcctgtatgagttggataaggaagagttccagacctttaaagaactcctgaagaagaaatcaagcgagagtacaacttgttccataccacagttcgagatcgaaaacgccaatgttgagtgcctggcactcttactgcacgaatactatggagcctctcttgcttgggcaaccagcatttccatctttgagaacatgaatttgaggacactgtcagagaaggcccgggacgatatgaaacgccatagtcccgaagaccctgaggctaccatgactgatcaaggcccaagcaaggaaaaagtgcccggtatttctcaggccgtacagcaggactccgcgacagcagccgagaccaaggaacaagagatctcacaggctatggagcaggaaggggccacggcagctgagactgaagaacaggaaataagccaagccatggagcaggagggagcgaccgccgcagaaacagaggaacagggccacggcggggatacttgggactacaagagtcatgtgatgaccaaattcgctgaggaagaggatgtccgacgttcttttgagaacacagccgctgactggcctgaaatgcaaaccctagccggagcattcgattccgacagatggggttttaggccacggacggtggttctccacggcaagagcgggatcggaaaatcggccctggctcgcagaattgtgctttgttgggcgcagggcggtctgtatcaggggatgttctcttacgtctttttcttgccggtgagggagatgcagcggaagaaagaatcctcagtaactgagtttatcagtcgcgagtggcccgatagccaagcacctgttacagaaattatgtcccgaccagagagactcctgttcatcatagacggattcgacgatttaggctctgtgctgaataacgacaccaagctctgcaaagattgggccgaaaagcagcccccttttactcttattaggagcctgttgcggaaggtcctactgccagagtcattcctcatcgtgacagtgcgtgacgtcggcaccgaaaaactgaagagtgaggttgtgtccccacgctatcttctggtaagagggattagcggagagcagaggatccatttgctcctggaacggggtatcggcgagcaccagaaaacgcaagggttacgagctattatgaataaccgcgaactgctagatcagtgtcaggtgccggccgtcggatctctcatatgcgtggcactgcagcttcaagacgttgtgggcgagtcagtcgccccttttaatcagaccttgacaggtctgcacgctgccttcgtgtttcatcagctcactcccagaggggtagttaggcggtgtctgaaccttgaagaacgcgtggtcctgaagagattctgcaggatggcagtggagggcgtctggaatcgtaaaagtgtgtttgatggagacgatttgatggttcagggcctcggggaaagcgagctgcgggcgttattccacatgaacatcctgctaccagactcccattgtgaagagtactacacctttttccacctctctctgcaagatttttgcgctgccctttattacgtgttggaaggactggagattgagcctgcactctgccccctgtatgtagaaaagacaaagcgatcgatggagttaaaacaggccggtttccacatccatagcctgtggatgaagagatttcttttcggcttggtctccgaagacgtgaggcgcccactcgaggttctgctagggtgtcccgtgcctctgggagtcaaacagaagctcctgcactgggtgtcacttttgggccaacagccaaatgctactaccccgggtgacacactggatgccttccattgcttatttgagacccaggacaaagagttcgtacggctcgcactgaacagttttcaggaggtgtggcttcccataaaccaaaatctggatttgattgcttctagcttctgtctccagcactgcccttacctgagaaagatcagggttgacgtcaaggggatctttccacgcgatgaatccgccgaggcgtgtcccgtggtgcctctatggatgcgagacaaaactctgattgaggagcagtgggaggatttctgctcaatgctcggcacgcatccacatctgcggcagcttgacttgggaagctctatcctgacagaacgtgccatgaagaccttatgtgctaaactcagacaccccacttgcaagattcaaaccctgatgtttaggaacgcacagataacaccgggcgtccagcacctttggcgcatcgttatggccaatcggaacctgagatccctaaatctcgggggaacccacctgaaagaggaagatgtgaggatggcttgtgaggccttgaagcatcctaagtgcctgttagaaagtctccgactggactgttgcggtcttactcacgcatgctatctgaaaattagccagatcttgacaacgtctccatccctcaagtcactgagtctagcgggcaacaaagtgaccgatcaaggggtaatgcccctgagcgacgcccttcgcgtctcgcagtgtgctctccagaagctgatcttggaggattgcggaattactgccacaggctgtcaatccctggcatctgctttagtgagcaatcggtcactcacccacctgtgccttagtaacaattccctgggtaacgagggggttaatttgctctgtagatctatgaggctgcctcattgcagcctacagcgtctgatgcttaaccagtgtcacctcgacacagccggctgcggattcctggcattggccttaatgggcaattcctggctgactcatctctcactgagcatgaaccccgtggaagacaatggggtcaaacttctgtgtgaggtgatgcgcgaaccaagttgccacttgcaggatctagagctggttaagtgtcatctcaccgctgcgtgctgcgaatctctgtcctgtgtgataagccggtcgagacaccttaaatcattagacctgacggataacgccctcggagacggcggtgtagcagctttgtgcgaggggctgaagcaaaagaactctgtcctcgccaggctgggacttaaagcctgtggcctgaccagtgattgctgtgaggctttgtccctagcactgagctgcaatcgacacctcacatctttaaacctggtgcagaataactttagccctaagggtatgatgaaactttgttccgccttcgcgtgccccacttcaaatctgcagatcattggcctctggaagtggcagtacccagtgcaaatccggaaattgctggaagaggtccagctcctgaagccgcgcgttgtgattgacgggagttggcatagctttgatgaagacgatagatattggtggaagaactga

SEQ ID NO: 9086 - RNA, 3603 nt, synthetic construct
  misc_feature 1..3603: note = derived and/or modified sequence opt4 fromNALP5__Homo_sapiens__CCDS12938.1
  source 1..3603: mol_type = other RNA
atgaaggtggccggcggcctggagctgggcgccgccgccctgctgagcgccagccccagagccctggtgaccctgagcaccggccccacctgcagcatcctgcccaagaaccccctgttcccccagaacctgagcagccagccctgcatcaagatggagggcgacaagagcctgaccttcagcagctacggcctgcagtggtgcctgtacgagctggacaaggaggagttccagaccttcaaggagctgctgaagaagaagagcagcgagagcaccacctgcagcatcccccagttcgagatcgagaacgccaacgtggagtgcctggccctgctgctgcacgagtactacggcgccagcctggcctgggccaccagcatcagcatcttcgagaacatgaacctgagaaccctgagcgagaaggccagagacgacatgaagagacacagccccgaggaccccgaggccaccatgaccgaccagggccccagcaaggagaaggtgcccggcatcagccaggccgtgcagcaggacagcgccaccgccgccgagaccaaggagcaggagatcagccaggccatggagcaggagggcgccaccgccgccgagaccgaggagcaggagatcagccaggccatggagcaggagggcgccaccgccgccgagaccgaggagcagggccacggcggcgacacctgggactacaagagccacgtgatgaccaagttcgccgaggaggaggacgtgagaagaagcttcgagaacaccgccgccgactggcccgagatgcagaccctggccggcgccttcgacagcgacagatggggcttcagacccagaaccgtggtgctgcacggcaagagcggcatcggcaagagcgccctggccagaagaatcgtgctgtgctgggcccagggcggcctgtaccagggcatgttcagctacgtgttcttcctgcccgtgagagagatgcagagaaagaaggagagcagcgtgaccgagttcatcagcagagagtggcccgacagccaggcccccgtgaccgagatcatgagcagacccgagagactgctgttcatcatcgacggcttcgacgacctgggcagcgtgctgaacaacgacaccaagctgtgcaaggactgggccgagaagcagccccccttcaccctgatcagaagcctgctgagaaaggtgctgctgcccgagagcttcctgatcgtgaccgtgagagacgtgggcaccgagaagctgaagagcgaggtggtgagccccagatacctgctggtgagaggcatcagcggcgagcagagaatccacctgctgctggagagaggcatcggcgagcaccagaagacccagggcctgagagccatcatgaacaacagagagctgctggaccagtgccaggtgcccgccgtgggcagcctgatctgcgtggccctgcagctgcaggacgtggtgggcgagagcgtggcccccttcaaccagaccctgaccggcctgcacgccgccttcgtgttccaccagctgacccccagaggcgtggtgagaagatgcctgaacctggaggagagagtggtgctgaagagattctgcagaatggccgtggagggcgtgtggaacagaaagagcgtgttcgacggcgacgacctgatggtgcagggcctgggcgagagcgagctgagagccctgttccacatgaacatcctgctgcccgacagccactgcgaggagtactacaccttcttccacctgagcctgcaggacttctgcgccgccctgtactacgtgctggagggcctggagatcgagcccgccctgtgccccctgtacgtggagaagaccaagagaagcatggagctgaagcaggccggcttccacatccacagcctgtggatgaagagattcctgttcggcctggtgagcgaggacgtgagaagacccctggaggtgctgctgggctgccccgtgcccctgggcgtgaagcagaagctgctgcactgggtgagcctgctgggccagcagcccaacgccaccacccccggcgacaccctggacgccttccactgcctgttcgagacccaggacaaggagttcgtgagactggccctgaacagcttccaggaggtgtggctgcccatcaaccagaacctggacctgatcgccagcagcttctgcctgcagcactgcccctacctgagaaagatcagagtggacgtgaagggcatcttccccagagacgagagcgccgaggcctgccccgtggtgcccctgtggatgagagacaagaccctgatcgaggagcagtgggaggacttctgcagcatgctgggcacccacccccacctgagacagctggacctgggcagcagcatcctgaccgagagagccatgaagaccctgtgcgccaagctgagacaccccacctgcaagatccagaccctgatgttcagaaacgcccagatcacccccggcgtgcagcacctgtggagaatcgtgatggccaacagaaacctgagaagcctgaacctgggcggcacccacctgaaggaggaggacgtgagaatggcctgcgaggccctgaagcaccccaagtgcctgctggagagcctgagactggactgctgcggcctgacccacgcctgctacctgaagatcagccagatcctgaccaccagccccagcctgaagagcctgagcctggccggcaacaaggtgaccgaccagggcgtgatgcccctgagcgacgccctgagagtgagccagtgcgccctgcagaagctgatcctggaggactgcggcatcaccgccaccggctgccagagcctggccagcgccctggtgagcaacagaagcctgacccacctgtgcctgagcaacaacagcctgggcaacgagggcgtgaacctgctgtgcagaagcatgagactgccccactgcagcctgcagagactgatgctgaaccagtgccacctggacaccgccggctgcggcttcctggccctggccctgatgggcaacagctggctgacccacctgagcctgagcatgaaccccgtggaggacaacggcgtgaagctgctgtgcgaggtgatgagagagcccagctgccacctgcaggacctggagctggtgaagtgccacctgaccgccgcctgctgcgagagcctgagctgcgtgatcagcagaagcagacacctgaagagcctggacctgaccgacaacgccctgggcgacggcggcgtggccgccctgtgcgagggcctgaagcagaagaacagcgtgctggccagactgggcctgaaggcctgcggcctgaccagcgactgctgcgaggccctgagcctggccctgagctgcaacagacacctgaccagcctgaacctggtgcagaacaacttcagccccaagggcatgatgaagctgtgcagcgccttcgcctgccccaccagcaacctgcagatcatcggcctgtggaagtggcagtaccccgtgcagatcagaaagctgctggaggaggtgcagctgctgaagcccagagtggtgatcgacggcagctggcacagcttcgacgaggacgacagatactggtggaagaactga

SEQ ID NO: 9087 - RNA, 3603 nt, synthetic construct
  misc_feature 1..3603: note = derived and/or modified sequence opt5 fromNALP5__Homo_sapiens__CCDS12938.1
  source 1..3603: mol_type = other RNA
atgaaggtggccggcgggctggagctcggagctgccgcgctgcttagcgcttcccccagagccctggtcaccctctctacaggccctacgtgcagcatcctgccgaaaaacccccttttccctcagaatctgtcctctcaaccctgtattaagatggaaggggacaaaagcctcaccttttcctcttacggactgcagtggtgcctgtatgagctcgataaggaagagttccagacatttaaagaactgcttaagaagaaaagctccgagagcaccacatgttctatccctcagttcgagattgaaaacgccaatgttgagtgcctggctctcctgcttcacgaatactatggcgcctccctggcttgggccaccagcatctctatttttgagaacatgaatctccggacactgtccgagaaggcgcgcgacgatatgaaaagacatagccccgaagaccctgaggccaccatgacggatcaagggccgtctaaggaaaaagtgcccggaatctcccaggctgtgcagcaggacagcgccaccgctgccgagacaaaggaacaagagatctcccaggcgatggagcaggaaggcgccaccgctgccgagacagaagaacaggaaatttctcaagctatggagcaggagggcgccaccgccgctgaaacggaggaacaggggcacggaggcgatacatgggactacaagagccatgtcatgaccaaattcgcggaggaagaggatgtgcggcgctcctttgagaacacagccgctgactggcctgaaatgcaaaccctggccggggccttcgatagcgacagatggggatttcggccccgcaccgttgtgctccacggcaagtctgggatcggaaaatccgctctggccagacggattgtcctttgttgggcgcagggcggcctgtatcaggggatgttcagctacgtgtttttcctccctgttcgcgagatgcagagaaagaaagaatctagcgtgacagagtttatctcccgggagtggcccgattctcaagctccggtcacggaaattatgagccgccctgagagactgcttttcatcattgacggattcgacgatctgggctccgtgctcaataacgacaccaagctgtgcaaagattgggccgaaaagcagcccccttttacactgatccggagcctcctgcgcaaggtgcttctgcccgagtctttcctcatcgtcaccgttagagacgtggggacagaaaaactgaagtccgaggtggtcagcccccggtatcttctggtgagaggaatttctggcgagcagcgcatccatctcctgctggaacgggggattggagagcaccagaaaacccaaggcctcagagccatcatgaataaccgcgaactgcttgatcagtgtcaggttcctgctgtgggctccctgatttgcgtcgccctccagctgcaagacgtggttggggagagcgtggctccgtttaatcagacgctgacaggacttcacgccgcgttcgtctttcatcagctcacaccccggggcgtggtcagacgctgtctgaacctggaagaacgggtggttctcaagagattctgccgcatggccgtggagggggtctggaatcggaaatccgtgtttgatggagacgatctgatggttcagggccttggggaatctgagctgagagctctcttccacatgaacatcctgctgcctgacagccattgtgaagagtactacacctttttccacctttccctccaagatttttgcgccgctctgtattacgtgctggaaggcctcgagatcgagcccgccctgtgccctctttatgtcgaaaagaccaagcgctctatggagctgaaacaggcgggattccacattcatagcctctggatgaagcggtttctgttcggcctggtgtccgaagacgtgagacggccccttgaggttctcctggggtgtccggtccctctgggagtgaaacagaagctcctgcactgggtgagccttctgggccaacagcccaatgccaccacacctggggacacgctcgatgctttccattgcctgtttgagacccaggacaaagagttcgtccgcctggcccttaactcttttcaggaggtgtggctccccatcaaccaaaatctggatctgattgcttccagcttctgtctccagcactgcccttacctgagaaagatccgggttgacgtgaagggaatttttcccagagatgaatctgccgaggcctgtccggtcgtgcctctttggatgcgcgacaaaacactgatcgaggagcagtgggaggatttctgctccatgctcggcacccatccccatctgcggcagctggaccttgggagctctatcctgacagaaagagctatgaagaccctctgtgcgaaactgcgccaccccacgtgcaagattcaaaccctcatgtttagaaacgcccagatcacacctggcgttcagcacctgtggcggattgtgatggctaatcgcaaccttagaagcctgaatctcggaggcacccacctgaaagaggaagatgtccggatggcctgtgaggccctgaagcatccgaagtgccttctggaatccctccgcctggactgttgcgggctcacacacgcttgctatctgaaaatcagccagattcttaccacgtctccctccctcaagagcctgtccctggccggaaacaaagtgacagatcaaggcgttatgcctctgtctgacgcgcttagagtgagccagtgtgctctgcagaagctcatcctggaggattgcgggattaccgccacaggatgtcaatccctcgcctctgctctggtcagcaatcggtcccttacccacctgtgcctgtctaacaatagcctcggcaacgagggggtgaatctgctttgtcgctccatgagactgccccattgcagcctccagcggctgatgctcaaccagtgtcacctggacaccgccggctgcggattccttgcgctggctctgatgggcaattcttggctcacacatctgtcccttagcatgaaccctgtggaagacaatggggtcaaactgctctgtgaggttatgcgcgaaccctcttgccatctgcaggatctcgagctggtgaagtgtcaccttacggccgcctgctgcgaatccctgagctgtgtgatctctagatcccggcacctgaaaagcctcgacctgaccgataacgctcttggagacggcggggtcgccgctctgtgcgagggactcaagcaaaagaactccgtgctggccagactcggcctgaaagcgtgtgggcttacaagcgattgctgtgaggccctgtctctggctctcagctgcaatcgccacctgacctcccttaacctggttcagaataacttttctcctaagggcatgatgaaactctgtagcgccttcgcttgccccacatccaatctgcagatcattggactgtggaagtggcagtacccggtgcaaatccggaaactccttgaagaggtccagctgctgaagcctagagtggttattgacggctcttggcatagctttgatgaagacgatcgctattggtggaagaactga

SEQ ID NO: 9088 - protein, 892 aa, synthetic construct
  REGION 1..892: note = NALP6__Homo_sapiens__P59044
MDQPEAPCSSTGPRLAVARELLLAALEELSQEQLKRFRHKLRDVGPDGRSIPWGRLERADAVDLAEQLAQFYGPEPALEVARKTLKRADARDVAAQLQERRLQRLGLGSGTLLSVSEYKKKYREHVLQLHARVKERNARSVKITKRFTKLLIAPESAAPEEAMGPAEEPEPGRARRSDTHTFNRLFRRDEEGRRPLTVVLQGPAGIGKTMAAKKILYDWAAGKLYQGQVDFAFFMPCGELLERPGTRSLADLILDQCPDRGAPVPQMLAQPQRLLFILDGADELPALGGPEAAPCTDPFEAASGARVLGGLLSKALLPTALLLVTTRAAAPGRLQGRLCSPQCAEVRGFSDKDKKKYFYKYFRDERRAERAYRFVKENETLFALCFVPFVCWIVCTVLRQQLELGRDLSRTSKTTTSVYLLFITSVLSSAPVADGPRLQGDLRNLCRLAREGVLGRRAQFAEKELEQLELRGSKVQTLFLSKKELPGVLETEVTYQFIDQSFQEFLAALSYLLEDGGVPRTAAGGVGTLLRGDAQPHSHLVLTTRFLFGLLSAERMRDIERHFGCMVSERVKQEALRWVQGQGQGCPGVAPEVTEGAKGLEDTEEPEEEEEGEEPNYPLELLYCLYETQEDAFVRQALCRFPELALQRVRFCRMDVAVLSYCVRCCPAGQALRLISCRLVAAQEKKKKSLGKRLQASLGGGSSSQGTTKQLPASLLHPLFQAMTDPLCHLSSLTLSHCKLPDAVCRDLSEALRAAPALTELGLLHNRLSEAGLRMLSEGLAWPQCRVQTVRVQLPDPQRGLQYLVGMLRQSPALTTLDLSGCQLPAPMVTYLCAVLQHQGCGLQTLSLASVELSEQSLQELQAVKRAKPDLVITHPALDGHPQPPKELISTF

SEQ ID NO: 9089 - RNA, 2679 nt, synthetic construct
  misc_feature 1..2679: note = NALP6__Homo_sapiens__CCDS7693.1
  source 1..2679: mol_type = other RNA
atggaccagccagaggccccctgctccagcacggggccgcgcctcgcggtggcccgcgagctgctcctggctgcgctggaggaactgagccaagagcagctgaagcgcttccgccacaagctgcgcgacgtgggcccggacggacgcagcatcccgtgggggcggctggagcgcgcggacgccgtggacctcgcggagcagctggcccagttctacggcccggagcctgccctggaggtggcccgcaagaccctcaagagggcggacgcgcgcgacgtggcggcgcagctccaggagcggcggctgcagcggctcgggctcggctccgggacgctgctctccgtgtccgagtacaagaagaagtaccgggagcacgtgctgcagctgcacgctcgggtgaaggagaggaacgcccgctccgtgaagatcaccaagcgcttcaccaagctgctcatcgcgcccgagagcgccgccccggaggaggcgatggggcccgcggaagagcctgagccggggcgcgcgcggcgctcggacacgcacactttcaaccgcctcttccgccgcgacgaggagggccggcggccgctgaccgtggtgctgcagggcccggcgggcatcggcaagaccatggcggccaaaaagatcctgtacgactgggcggcgggcaagctgtaccagggccaggtggacttcgccttcttcatgccctgcggcgagctgctggagaggccgggcacgcgcagcctggctgacctgatcctggaccagtgccccgaccgcggcgcgccggtgccgcagatgctggcccagccgcagcggctgctcttcatcctggacggcgcggacgagctgccggcgctggggggccccgaggccgcgccctgcacagaccccttcgaggcggcgagcggcgcgcgggtgctaggcgggctgctgagcaaggcgctgctgcccacggccctcctgctggtgaccacgcgcgccgccgcccccgggaggctgcagggccgcctgtgttccccgcagtgcgccgaggtgcgcggcttctccgacaaggacaagaagaagtatttctacaagtatttccgggatgagaggagggccgagcgcgcctaccgcttcgtgaaggagaacgagacgctgttcgcgctgtgcttcgtgcccttcgtgtgctggatcgtgtgcaccgtgctgcgccagcagctggagctcggtcgggacctgtcgcgcacgtccaagaccaccacgtcagtgtacctgcttttcatcaccagcgttctgagctcggctccggtagccgacgggccccggttgcagggcgacctgcgcaatctgtgccgcctggcccgcgagggcgtcctcggacgcagggcgcagtttgccgagaaggaactggagcaactggagcttcgtggctccaaagtgcagacgctgtttctcagcaaaaaggagctgccgggcgtgctggagacagaggtcacctaccagttcatcgaccagagcttccaggagttcctcgcggcactgtcctacctgctggaggacggcggggtgcccaggaccgcggctggcggcgttgggacactcctgcgtggggacgcccagccgcacagccacttggtgctcaccacgcgcttcctcttcggactgctgagcgcggagcggatgcgcgacatcgagcgccacttcggctgcatggtttcagagcgtgtgaagcaggaggccctgcggtgggtgcagggacagggacagggctgccccggagtggcaccagaggtgaccgagggggccaaagggctcgaggacaccgaagagccagaggaggaggaggagggagaggagcccaactacccactggagttgctgtactgcctgtacgagacgcaggaggacgcgtttgtgcgccaagccctgtgccggttcccggagctggcgctgcagcgagtgcgcttctgccgcatggacgtggctgttctgagctactgcgtgaggtgctgccctgctggacaggcactgcggctgatcagctgcagattggttgctgcgcaggagaagaagaagaagagcctggggaagcggctccaggccagcctgggtggcggcagcagttctcaaggcaccacaaaacaactgccagcctcccttcttcatccactctttcaggcaatgactgacccactgtgccatctgagcagcctcacgctgtcccactgcaaactccctgacgcggtctgccgagacctttctgaggccctgagggcagcccccgcactgacggagctgggcctcctccacaacaggctcagtgaggcgggactgcgtatgctgagtgagggcctagcctggccgcagtgcagggtgcagacggtcagggtacagctgcctgacccccagcgagggctccagtacctggtgggtatgcttcggcagagccctgccctgaccaccctggatctcagcggctgccaactgcccgcccccatggtgacctacctgtgtgcagtcctgcagcaccagggatgcggcctgcagaccctcagtctggcctctgtggagctgagcgagcagtcactacaggagcttcaggctgtgaagagagcaaagccggatctggtcatcacacacccagcgctggacggccacccacaacctcccaaggaactcatctcgaccttctga

SEQ ID NO: 9090 - RNA, 2679 nt, synthetic construct
  misc_feature 1..2679: note = derived and/or modified sequence opt1 fromNALP6__Homo_sapiens__CCDS7693.1
  source 1..2679: mol_type = other RNA
atggaccagcccgaggccccctgcagctccaccggcccccgcctggccgtggcgcgggagctcctgctggccgccctcgaggagctgagccaggagcagctgaagcgcttccggcacaagctccgcgacgtcgggcccgacggccggtccatcccctgggggcgcctggagcgggccgacgccgtggacctggcggagcagctcgcccagttctacggcccggagcccgccctggaggtggcccgcaagaccctgaagcgggcggacgcccgcgacgtcgccgcccagctccaggagcggcgcctgcagcggctggggctcggcagcggcacgctgctgtccgtgagcgagtacaagaagaagtaccgcgagcacgtgctccagctgcacgcccgggtcaaggagcgcaacgcgcggtccgtgaagatcaccaagcgcttcaccaagctgctcatcgcccccgagagcgccgcccccgaggaggccatggggccggcggaggagcccgagcccggccgggcccgccggtccgacacccacacgttcaaccgcctgttccgccgggacgaggaggggcgccggcccctgaccgtggtcctccagggcccggccgggatcggcaagaccatggccgccaagaagatcctgtacgactgggcggccggcaagctgtaccagggccaggtggacttcgccttcttcatgccctgcggggagctcctggagcgccccgggacccggagcctggccgacctcatcctggaccagtgccccgaccgcggcgccccggtgccccagatgctggcgcagccccagcggctcctgttcatcctggacggcgccgacgagctccccgccctcgggggcccggaggccgcgccctgcacggaccccttcgaggccgcctccggggcccgcgtcctgggcgggctcctgagcaaggccctgctccccaccgcgctgctgctcgtgaccacccgggccgccgccccgggccgcctgcagggccggctgtgcagcccccagtgcgccgaggtgcgcgggttctccgacaaggacaagaagaagtacttctacaagtacttccgggacgagcgccgggcggagcgcgcctaccggttcgtcaaggagaacgagacgctgttcgccctgtgcttcgtgcccttcgtgtgctggatcgtctgcaccgtgctgcgccagcagctggagctcggccgggacctgtcccgcaccagcaagaccacgacctccgtgtacctcctgttcatcaccagcgtcctgtccagcgcccccgtggccgacgggccgcgcctgcagggcgacctccggaacctgtgccgcctggcgcgggagggggtgctcggccgccgggcccagttcgccgagaaggagctggagcagctggagctccgcggcagcaaggtccagaccctgttcctgtccaagaaggagctccccggggtgctggagacggaggtcacctaccagttcatcgaccagagcttccaggagttcctggccgcgctctcctacctgctggaggacggcggggtgccccggaccgccgccggcggggtgggcaccctcctgcgcggcgacgcccagccgcacagccacctggtcctcacgacccggttcctgttcgggctgctctccgccgagcgcatgcgggacatcgagcgccacttcggctgcatggtgagcgagcgggtgaagcaggaggcgctgcgctgggtccaggggcagggccagggctgccccggggtggcccccgaggtgaccgagggcgccaaggggctggaggacaccgaggagcccgaggaggaggaggagggcgaggagccgaactaccccctcgagctgctgtactgcctctacgagacgcaggaggacgccttcgtccggcaggccctgtgccgcttccccgagctggcgctccagcgggtgcgcttctgccggatggacgtggccgtcctgtcctactgcgtgcgctgctgccccgccgggcaggccctgcggctcatcagctgccgcctggtggccgcgcaggagaagaagaagaagtccctgggcaagcgcctccaggccagcctgggcgggggctccagctcccaggggaccaccaagcagctgccggccagcctcctgcaccccctgttccaggccatgaccgaccccctctgccacctgtccagcctgacgctctcccactgcaagctgcccgacgcggtctgccgggacctgagcgaggccctccgcgccgccccggccctgaccgagctgggcctcctgcacaaccggctgtccgaggcggggctccgcatgctgagcgagggcctggcctggccccagtgccgggtgcagaccgtgcgcgtccagctccccgacccccagcggggcctgcagtacctggtggggatgctccgccagagcccggccctgaccacgctggacctctccggctgccagctgcccgcccccatggtgacctacctgtgcgccgtcctccagcaccaggggtgcggcctgcagaccctgagcctcgcgtccgtggagctgagcgagcagtccctgcaggagctccaggccgtgaagcgggccaagcccgacctggtcatcacccacccggccctggacgggcacccccagccgcccaaggagctcatcagcaccttctga

SEQ ID NO: 9091 - RNA, 2679 nt, synthetic construct
  misc_feature 1..2679: note = derived and/or modified sequence opt2 fromNALP6__Homo_sapiens__CCDS7693.1
  source 1..2679: mol_type = other RNA
atggaccagcccgaggccccctgctcctccaccggcccccgcctcgccgtcgcccgcgagctcctcctcgccgccctcgaggagctctcccaggagcagctcaagcgcttccgccacaagctccgcgacgtcggccccgacggccgctccatcccctggggccgcctcgagcgcgccgacgccgtcgacctcgccgagcagctcgcccagttctacggccccgagcccgccctcgaggtcgcccgcaagaccctcaagcgcgccgacgcccgcgacgtcgccgcccagctccaggagcgccgcctccagcgcctcggcctcggctccggcaccctcctctccgtctccgagtacaagaagaagtaccgcgagcacgtcctccagctccacgcccgcgtcaaggagcgcaacgcccgctccgtcaagatcaccaagcgcttcaccaagctcctcatcgcccccgagtccgccgcccccgaggaggccatgggccccgccgaggagcccgagcccggccgcgcccgccgctccgacacccacaccttcaaccgcctcttccgccgcgacgaggagggccgccgccccctcaccgtcgtcctccagggccccgccggcatcggcaagaccatggccgccaagaagatcctctacgactgggccgccggcaagctctaccagggccaggtcgacttcgccttcttcatgccctgcggcgagctcctcgagcgccccggcacccgctccctcgccgacctcatcctcgaccagtgccccgaccgcggcgcccccgtcccccagatgctcgcccagccccagcgcctcctcttcatcctcgacggcgccgacgagctccccgccctcggcggccccgaggccgccccctgcaccgaccccttcgaggccgcctccggcgcccgcgtcctcggcggcctcctctccaaggccctcctccccaccgccctcctcctcgtcaccacccgcgccgccgcccccggccgcctccagggccgcctctgctccccccagtgcgccgaggtccgcggcttctccgacaaggacaagaagaagtacttctacaagtacttccgcgacgagcgccgcgccgagcgcgcctaccgcttcgtcaaggagaacgagaccctcttcgccctctgcttcgtccccttcgtctgctggatcgtctgcaccgtcctccgccagcagctcgagctcggccgcgacctctcccgcacctccaagaccaccacctccgtctacctcctcttcatcacctccgtcctctcctccgcccccgtcgccgacggcccccgcctccagggcgacctccgcaacctctgccgcctcgcccgcgagggcgtcctcggccgccgcgcccagttcgccgagaaggagctcgagcagctcgagctccgcggctccaaggtccagaccctcttcctctccaagaaggagctccccggcgtcctcgagaccgaggtcacctaccagttcatcgaccagtccttccaggagttcctcgccgccctctcctacctcctcgaggacggcggcgtcccccgcaccgccgccggcggcgtcggcaccctcctccgcggcgacgcccagccccactcccacctcgtcctcaccacccgcttcctcttcggcctcctctccgccgagcgcatgcgcgacatcgagcgccacttcggctgcatggtctccgagcgcgtcaagcaggaggccctccgctgggtccagggccagggccagggctgccccggcgtcgcccccgaggtcaccgagggcgccaagggcctcgaggacaccgaggagcccgaggaggaggaggagggcgaggagcccaactaccccctcgagctcctctactgcctctacgagacccaggaggacgccttcgtccgccaggccctctgccgcttccccgagctcgccctccagcgcgtccgcttctgccgcatggacgtcgccgtcctctcctactgcgtccgctgctgccccgccggccaggccctccgcctcatctcctgccgcctcgtcgccgcccaggagaagaagaagaagtccctcggcaagcgcctccaggcctccctcggcggcggctcctcctcccagggcaccaccaagcagctccccgcctccctcctccaccccctcttccaggccatgaccgaccccctctgccacctctcctccctcaccctctcccactgcaagctccccgacgccgtctgccgcgacctctccgaggccctccgcgccgcccccgccctcaccgagctcggcctcctccacaaccgcctctccgaggccggcctccgcatgctctccgagggcctcgcctggccccagtgccgcgtccagaccgtccgcgtccagctccccgacccccagcgcggcctccagtacctcgtcggcatgctccgccagtcccccgccctcaccaccctcgacctctccggctgccagctccccgcccccatggtcacctacctctgcgccgtcctccagcaccagggctgcggcctccagaccctctccctcgcctccgtcgagctctccgagcagtccctccaggagctccaggccgtcaagcgcgccaagcccgacctcgtcatcacccaccccgccctcgacggccacccccagccccccaaggagctcatctccaccttctga

SEQ ID NO: 9092 - RNA, 2679 nt, synthetic construct
  misc_feature 1..2679: note = derived and/or modified sequence opt3 fromNALP6__Homo_sapiens__CCDS7693.1
  source 1..2679: mol_type = other RNA
atggaccagcccgaggccccttgcagctccaccggcccaagactggctgtggcaagggaactccttctggccgcgttggaggaattatctcaagagcagctgaagcggttccgccacaaactacgagatgtcgggccggacggacgttcaatcccctggggtagactcgaaagggctgatgccgttgacctggcagagcagcttgcccagttttacggccctgagccagctctggaagtggcacggaagacattgaaacgcgccgatgctagagacgtagccgcgcaactccaggagaggcggctgcagcgcctggggctcggaagtggcactttactgagcgtgtccgaatataagaaaaagtaccgagagcatgtccttcagttgcacgcaagagtgaaggagaggaacgcccggtctgttaaaattacgaagcgtttcaccaaactgctaatagctcccgaatcggccgcacctgaggaagctatgggtccagccgaggaacccgagcctgggcgcgcgagaaggtcagatacacatacttttaatcggttgttccgacgcgacgaggaaggaagaaggccactgaccgtggtccttcaaggcccggccggcatcgggaagacaatggcagctaaaaagattctgtatgattgggccgctggaaagttgtaccagggtcaggtggactttgccttctttatgccctgtggcgagctcctggaacggcctgggacccgcagcttagcagatctgatcctcgaccagtgcccagatagaggagcccccgtacctcaaatgcttgctcagccacagaggctgttgttcattctagacggcgcggacgagctgcccgcactcggtgggccggaagccgctccttgtactgatccctttgaggccgcaagtggagcccgtgttctgggcggccttctgtccaaagctctcctcccaacagccctgttactggtgaccacgcgggcagcggctcctgggcgactacaaggaagactctgctctccccagtgtgccgaggtcaggggtttcagcgacaaggataaaaagaaatatttttacaagtatttccgcgacgaacggagagcagagagggcctaccgctttgtgaaagaaaacgagactctgttcgctctttgcttcgtgccatttgtctgttggatcgtttgcaccgtgttgcgacagcagctggaactcggccgggatctgtcccgtacatcaaagactaccacaagtgtataccttctgttcataaccagcgtgttgtcttccgcccccgtcgcagacgggcctagactccaaggagatctgaggaatttatgtcgcctggctcgggagggcgtgctaggtagaagggcccagtttgcggagaaggaactcgagcagctggaacttcgagggtcaaaagttcagacgttgttcctgagcaagaaagagctcccaggcgtgctggagactgaagtcacatatcaatttatcgaccagagtttccaggagtttttagccgctctgtcttaccttttggaagatggaggcgtgccgcgcaccgcagccgggggagtaggtactctcctgcggggcgacgctcagccccactcccatctagttctgacaaccagattcctctttgggctgcttagcgccgagaggatgcgtgatattgaacgccacttcggatgcatggtgtcggagcgggtcaagcaagaggcattgagatgggtgcagggccagggtcaggggtgtcctggcgtcgcgccagaagtgacggagggagccaaaggcctggaagacaccgaggaacccgaggaggaagaggaaggggaggaacctaactatccattagagctcctgtactgcctttatgagacacaagaagacgcttttgttaggcaggccctgtgccgattccccgagttggcactccagcgggtgcgcttttgtagaatggatgtagctgtcctgtcttactgcgtgaggtgttgcccggccggacaagcactacggctgatctcctgtcgactcgttgccgctcaggaaaagaagaaaaagtcactgggtaaaagacttcaggcgagtttgggcgggggaagctcctctcagggcactaccaagcaactgcctgccagcttactccacccactgttccaggcaatgacagaccccctttgccatctgtcaagtctaactctctcccactgtaaactgcctgatgctgtgtgccgcgacttgagcgaggccctgagggccgctcccgcattaaccgagctcggtctgcttcataatcgtctgtctgaagccgggttgcggatgctctcagagggcctggcgtggccacagtgtagagtccagacagtgagggtacaactacctgatccccagcgcggactgcagtatcttgtgggcatgctccgacagagtccagctctgaccactttggacctgagcgggtgccaattaccggcccctatggttacgtacctctgtgcagtcctgcagcaccagggatgcggccttcaaacactgtccttggcctctgtggaactctcggagcagagcctgcaggaactacaggctgtgaagagagcaaagcccgatctggtcattacccacccagcccttgacggtcatccccaacctccaaaagagctcatctccactttctga

SEQ ID NO: 9093 - RNA, 2679 nt, synthetic construct
  misc_feature 1..2679: note = derived and/or modified sequence opt4 fromNALP6__Homo_sapiens__CCDS7693.1
  source 1..2679: mol_type = other RNA
atggaccagcccgaggccccctgcagcagcaccggccccagactggccgtggccagagagctgctgctggccgccctggaggagctgagccaggagcagctgaagagattcagacacaagctgagagacgtgggccccgacggcagaagcatcccctggggcagactggagagagccgacgccgtggacctggccgagcagctggcccagttctacggccccgagcccgccctggaggtggccagaaagaccctgaagagagccgacgccagagacgtggccgcccagctgcaggagagaagactgcagagactgggcctgggcagcggcaccctgctgagcgtgagcgagtacaagaagaagtacagagagcacgtgctgcagctgcacgccagagtgaaggagagaaacgccagaagcgtgaagatcaccaagagattcaccaagctgctgatcgcccccgagagcgccgcccccgaggaggccatgggccccgccgaggagcccgagcccggcagagccagaagaagcgacacccacaccttcaacagactgttcagaagagacgaggagggcagaagacccctgaccgtggtgctgcagggccccgccggcatcggcaagaccatggccgccaagaagatcctgtacgactgggccgccggcaagctgtaccagggccaggtggacttcgccttcttcatgccctgcggcgagctgctggagagacccggcaccagaagcctggccgacctgatcctggaccagtgccccgacagaggcgcccccgtgccccagatgctggcccagccccagagactgctgttcatcctggacggcgccgacgagctgcccgccctgggcggccccgaggccgccccctgcaccgaccccttcgaggccgccagcggcgccagagtgctgggcggcctgctgagcaaggccctgctgcccaccgccctgctgctggtgaccaccagagccgccgcccccggcagactgcagggcagactgtgcagcccccagtgcgccgaggtgagaggcttcagcgacaaggacaagaagaagtacttctacaagtacttcagagacgagagaagagccgagagagcctacagattcgtgaaggagaacgagaccctgttcgccctgtgcttcgtgcccttcgtgtgctggatcgtgtgcaccgtgctgagacagcagctggagctgggcagagacctgagcagaaccagcaagaccaccaccagcgtgtacctgctgttcatcaccagcgtgctgagcagcgcccccgtggccgacggccccagactgcagggcgacctgagaaacctgtgcagactggccagagagggcgtgctgggcagaagagcccagttcgccgagaaggagctggagcagctggagctgagaggcagcaaggtgcagaccctgttcctgagcaagaaggagctgcccggcgtgctggagaccgaggtgacctaccagttcatcgaccagagcttccaggagttcctggccgccctgagctacctgctggaggacggcggcgtgcccagaaccgccgccggcggcgtgggcaccctgctgagaggcgacgcccagccccacagccacctggtgctgaccaccagattcctgttcggcctgctgagcgccgagagaatgagagacatcgagagacacttcggctgcatggtgagcgagagagtgaagcaggaggccctgagatgggtgcagggccagggccagggctgccccggcgtggcccccgaggtgaccgagggcgccaagggcctggaggacaccgaggagcccgaggaggaggaggagggcgaggagcccaactaccccctggagctgctgtactgcctgtacgagacccaggaggacgccttcgtgagacaggccctgtgcagattccccgagctggccctgcagagagtgagattctgcagaatggacgtggccgtgctgagctactgcgtgagatgctgccccgccggccaggccctgagactgatcagctgcagactggtggccgcccaggagaagaagaagaagagcctgggcaagagactgcaggccagcctgggcggcggcagcagcagccagggcaccaccaagcagctgcccgccagcctgctgcaccccctgttccaggccatgaccgaccccctgtgccacctgagcagcctgaccctgagccactgcaagctgcccgacgccgtgtgcagagacctgagcgaggccctgagagccgcccccgccctgaccgagctgggcctgctgcacaacagactgagcgaggccggcctgagaatgctgagcgagggcctggcctggccccagtgcagagtgcagaccgtgagagtgcagctgcccgacccccagagaggcctgcagtacctggtgggcatgctgagacagagccccgccctgaccaccctggacctgagcggctgccagctgcccgcccccatggtgacctacctgtgcgccgtgctgcagcaccagggctgcggcctgcagaccctgagcctggccagcgtggagctgagcgagcagagcctgcaggagctgcaggccgtgaagagagccaagcccgacctggtgatcacccaccccgccctggacggccacccccagccccccaaggagctgatcagcaccttctga

SEQ ID NO: 9094 - RNA, 2679 nt, synthetic construct
  misc_feature 1..2679: note = derived and/or modified sequence opt5 fromNALP6__Homo_sapiens__CCDS7693.1
  source 1..2679: mol_type = other RNA
atggaccagcccgaggccccttgcagctccaccggcccgagactggctgtggcccgggaactcctgcttgcggctctggaggaactctctcaagagcagctgaagcgcttcagacacaaacttcgggatgtcgggcccgacggacgcagcatcccttggggcagactggaacgggccgatgccgttgacctcgctgagcagctggcccagttttacgggcccgagcctgctctggaagtggcccgcaagacactcaaaagagcggatgcccgggacgtggctgcccaactgcaggagcgcagacttcagcggctgggactcggctccgggacgctgctttctgtcagcgaatataagaaaaagtaccgcgagcatgtgctgcagctccacgctagagttaaggagcggaacgcccgctccgtgaaaattaccaagagattcacaaaactgctgatcgcgcccgaatctgccgctcctgaggaagccatgggaccggctgaggaacccgagcctggccgggccagacgcagcgatacccatacatttaatcggctgttcagacgcgacgaggaaggccggagacccctgaccgtcgtgcttcaagggcctgccggaattggcaagacaatggctgcgaaaaagatcctgtatgattgggccgctgggaagctctaccagggacaggttgactttgccttctttatgccctgtggcgagctgcttgaacgcccggggacccggtccctggccgatctcattctggaccagtgccctgatagaggagctcccgtgcctcaaatgctggcccagccccagcgcctcctgttcatccttgacggcgcggacgagctgcccgctctcggcgggcctgaagccgccccgtgtacggatccctttgaggctgccagcggagctcgggtcctgggcgggcttctgtctaaagccctcctgcctaccgcgctgctcctggtgacaaccagagccgctgcccccggacgccttcaaggccggctgtgctcccctcagtgtgctgaggtgagagggttcagcgacaaggataaaaagaaatatttttacaagtatttccgggacgaacgcagagccgagcgggcgtacagatttgtcaaagaaaacgagacactcttcgccctgtgcttcgttccctttgtgtgttggatcgtgtgcaccgtcctgcgccagcagcttgaactcggacgggatctgtctagaacgtccaagacaaccacaagcgtgtacctcctcttcattacctctgttctgtccagcgctccggtggccgacggccctcgccttcaaggcgatctgagaaatctctgtcggctggctcgcgagggggtcctgggaagacgggcccagtttgccgagaaggaacttgagcagctcgaactgcgcggctccaaagtgcagaccctgttcctctctaagaaagagctgcccggggttcttgagacagaagtgacgtatcaatttatcgaccagagcttccaggagtttctggctgcgctctcctacctgctggaagatggaggcgtccctagaaccgccgctgggggcgtgggaacacttctccggggcgacgcccagccccacagccatctggtcctgaccacacgcttcctctttgggctgctttctgccgagagaatgcgggatattgaacgccacttcggatgcatggtgtccgagagagttaagcaagaggctctgcggtgggtgcagggccaggggcagggatgtcctggcgtcgcccccgaagtgaccgagggggcgaaaggcctcgaagacacggaggaaccggaggaggaagaggaaggagaggaacctaactatcccctggagctgctttactgcctctatgagacacaagaagacgcttttgttagacaggccctgtgccgcttccccgagctggccctccagcgggtgagattttgtcgcatggatgtcgctgtgctgagctactgcgtgcggtgttgccctgccggccaagcgcttagactgatctcttgtcgcctcgttgctgcccaggaaaagaagaaaaagagcctggggaaacggctgcaggcctcccttggaggcgggtctagctcccagggaaccaccaagcaactgccggctagcctcctgcaccccctcttccaggccatgacagaccctctgtgccatctttcttccctgaccctcagccactgtaaactgcccgatgctgtctgcagagacctgtctgaggcccttcgcgcggcccctgctctgacagagctcggcctgctccataatcggctgtccgaagccgggcttagaatgctgagcgagggcctcgcttggccccagtgtcgggtgcagacggtgcgcgtccaactgcctgatccccagagaggactgcagtatcttgtgggcatgctgcggcagtccccggccctcaccacactggacctctctgggtgccaactgcctgcccccatggttacctacctttgtgctgtgctgcagcaccagggatgcggcctgcaaacactcagcctggcgtccgtcgaactttctgagcagagcctgcaggaactccaggccgtgaagcgcgctaagcctgatctggttattacccaccccgccctcgacgggcatccgcaacctcccaaagagctgatctccacgttctga

SEQ ID NO: 9095 - protein, 980 aa, synthetic construct
  REGION 1..980: note = NALP7__Homo_sapiens__Q8WX94
MTSPQLEWTLQTLLEQLNEDELKSFKSLLWAFPLEDVLQKTPWSEVEEADGKKLAEILVNTSSENWIRNATVNILEEMNLTELCKMAKAEMMEDGQVQEIDNPELGDAEEDSELAKPGEKEGWRNSMEKQSLVWKNTFWQGDIDNFHDDVTLRNQRFIPFLNPRTPRKLTPYTVVLHGPAGVGKTTLAKKCMLDWTDCNLSPTLRYAFYLSCKELSRMGPCSFAELISKDWPELQDDIPSILAQAQRILFVVDGLDELKVPPGALIQDICGDWEKKKPVPVLLGSLLKRKMLPRAALLVTTRPRALRDLQLLAQQPIYVRVEGFLEEDRRAYFLRHFGDEDQAMRAFELMRSNAALFQLGSAPAVCWIVCTTLKLQMEKGEDPVPTCLTRTGLFLRFLCSRFPQGAQLRGALRTLSLLAAQGLWAQMSVFHREDLERLGVQESDLRLFLDGDILRQDRVSKGCYSFIHLSFQQFLTALFYALEKEEGEDRDGHAWDIGDVQKLLSGEERLKNPDLIQVGHFLFGLANEKRAKELEATFGCRMSPDIKQELLQCKAHLHANKPLSVTDLKEVLGCLYESQEEELAKVVVAPFKEISIHLTNTSEVMHCSFSLKHCQDLQKLSLQVAKGVFLENYMDFELDIEFERCTYLTIPNWARQDLRSLRLWTDFCSLFSSNSNLKFLEVKQSFLSDSSVRILCDHVTRSTCHLQKVEIKNVTPDTAYRDFCLAFIGKKTLTHLTLAGHIEWERTMMLMLCDLLRNHKCNLQYLRLGGHCATPEQWAEFFYVLKANQSLKHLRLSANVLLDEGAMLLYKTMTRPKHFLQMLSLENCRLTEASCKDLAAVLVVSKKLTHLCLAKNPIGDTGVKFLCEGLSYPDCKLQTLVLQQCSITKLGCRYLSEALQEACSLTNLDLSINQIARGLWILCQALENPNCNLKHLRLKTYETNLEIKKLLEEVKEKNPKLTIDCNASGATAPPCCDFFC

SEQ ID NO: 9096 - RNA, 2943 nt, synthetic construct
  misc_feature 1..2943: note = NALP7__Homo_sapiens__AAL69963
  source 1..2943: mol_type = other RNA
atgacatcgccccagctagagtggactctgcagacccttctggagcagctgaacgaggatgaattaaagagtttcaaatcccttttatgggcttttcccctcgaagacgtgctacagaagaccccatggtctgaggtggaagaggctgatggcaagaaactggcagaaattctggtcaacacctcctcagaaaattggataaggaatgcgactgtgaacatcttggaagagatgaatctcacggaattgtgtaagatggcaaaggctgagatgatggaggacggacaggtgcaagaaatagataatcctgagctgggagatgcagaagaagactcggagttagcaaagccaggtgaaaaggaaggatggagaaattcaatggagaaacagtctttggtctggaagaacaccttttggcaaggagacattgacaatttccatgacgacgtcactctgagaaaccaacggttcattccattcttgaatcccagaacacccaggaagctaacaccttacacggtggtgctgcacggccccgcaggcgtggggaaaaccacgctggccaaaaagtgtatgctggactggacagactgcaacctcagcccgacgctcagatacgcgttctacctcagctgcaaggagctcagccgcatgggcccctgcagttttgcagagctgatctccaaagactggcctgaattgcaggatgacattccaagcatcctagcccaagcacagagaatcctgttcgtggtcgatggccttgatgagctgaaagtcccacctggggcgctgatccaggacatctgcggggactgggagaagaagaagccggtgcccgtcctcctggggagtttgctgaagaggaagatgttacccagggcagccttgctggtcaccacgcggcccagggcactgagggacctccagctcctggcgcagcagccgatctacgtaagggtggagggcttcctggaggaggacaggagggcctatttcctgagacactttggagacgaggaccaagccatgcgtgcctttgagctaatgaggagcaacgcggccctgttccagctgggctcggcccccgcggtgtgctggattgtgtgcacgactctgaagctgcagatggagaagggggaggacccggtccccacctgcctcacccgcacggggctgttcctgcgtttcctctgcagccggttcccgcagggcgcacagctgcggggcgcgctgcggacgctgagcctcctggccgcgcagggcctgtgggcgcagatgtccgtgttccaccgagaggacctggaaaggctcggggtgcaggagtccgacctccgtctgttcctggacggagacatcctccgccaggacagagtctccaaaggctgctactccttcatccacctcagcttccagcagtttctcactgccctgttctacgccctggagaaggaggagggggaggacagggacggccacgcctgggacatcggggacgtacagaagctgctttccggagaagaaagactcaagaaccccgacctgattcaagtaggacacttcttattcggcctcgctaacgagaagagagccaaggagttggaggccacttttggctgccggatgtcaccggacatcaaacaggaattgctgcaatgcaaagcacatcttcatgcaaataagcccttatccgtgaccgacctgaaggaggtcttgggctgcctgtatgagtctcaggaggaggagctggcgaaggtggtggtggccccgttcaaggaaatttctattcacctgacaaatacttctgaagtgatgcattgttccttcagcctgaagcattgtcaagacttgcagaaactctcactgcaggtagcaaagggggtgttcctggagaattacatggattttgaactggacattgaatttgaaaggtgcacttacctaaccattccgaactgggctcggcaggatcttcgctctcttcgcctctggacagatttctgctctctcttcagctcaaacagcaacctcaagtttctggaagtgaaacaaagcttcctgagtgactcttctgtgcggattctttgtgaccacgtaacccgtagcacctgtcatctgcagaaagtggagattaaaaacgtcacccctgacaccgcgtaccgggacttctgtcttgctttcattgggaagaagaccctcacgcacctgaccctggcagggcacatcgagtgggaacgcacgatgatgctgatgctgtgtgacctgctcagaaatcataaatgcaacctgcagtacctgaggttgggaggtcactgtgccaccccggagcagtgggctgaattcttctatgtcctcaaagccaaccagtccctgaagcacctgcgtctctcagccaatgtgctcctggatgagggtgccatgttgctgtacaagaccatgacacgcccaaaacacttcctgcagatgttgtcgttggaaaactgtcgtcttacagaagccagttgcaaggaccttgctgctgtcttggttgtcagcaagaagctgacacacctgtgcttggccaagaaccccattggggatacaggggtgaagtttctgtgtgagggcttgagttaccctgattgtaaactgcagaccttggtgttacagcaatgcagcataaccaagcttggctgtagatatctctcagaggcgctccaagaagcctgcagcctcacaaacctggacttgagtatcaaccagatagctcgtggattgtggattctctgtcaggcattagagaatccaaactgtaacctaaaacacctacggttgaagacctatgaaactaatttggaaatcaagaagctgttggaggaagtgaaagaaaagaatcccaagctgactattgattgcaatgcttccggggcaacggcacctccgtgctgtgactttttttgctga

SEQ ID NO: 9097 - RNA, 2943 nt, synthetic construct
  misc_feature 1..2943: note = derived and/or modified sequence opt1 fromNALP7__Homo_sapiens__AAL69963
  source 1..2943: mol_type = other RNA
atgaccagcccccagctggagtggaccctccagacgctgctggagcagctcaacgaggacgagctgaagtccttcaagagcctgctctgggccttccccctggaggacgtgctgcagaagaccccctggtccgaggtcgaggaggccgacggcaagaagctcgcggagatcctggtgaacaccagctccgagaactggatccgcaacgccaccgtgaacatcctggaggagatgaacctcacggagctgtgcaagatggccaaggccgagatgatggaggacgggcaggtccaggagatcgacaaccccgagctgggcgacgccgaggaggacagcgagctcgcgaagcccggggagaaggagggctggcggaactccatggagaagcagagcctggtgtggaagaacaccttctggcagggggacatcgacaacttccacgacgacgtgaccctgcgcaaccagcggttcatcccgttcctcaacccccgcacgccccggaagctgaccccctacaccgtcgtgctgcacggcccggccggcgtggggaagaccaccctcgccaagaagtgcatgctggactggacggactgcaacctgtcccccaccctccgctacgccttctacctgagctgcaaggagctgtcccggatgggcccctgcagcttcgcggagctcatctccaaggactggcccgagctgcaggacgacatcccgagcatcctggcccaggcccagcgcatcctcttcgtcgtggacgggctggacgagctgaaggtgccgcccggcgccctcatccaggacatctgcggggactgggagaagaagaagcccgtccccgtgctgctgggctccctcctgaagcggaagatgctgccccgcgccgcgctcctggtgaccacccggccccgcgccctgcgggacctccagctgctggcccagcagcccatctacgtccgcgtggagggcttcctcgaggaggaccggcgcgcctacttcctgcggcacttcggggacgaggaccaggccatgcgcgcgttcgagctgatgcggagcaacgccgccctcttccagctgggctccgccccggccgtgtgctggatcgtctgcacgaccctgaagctgcagatggagaagggggaggaccccgtgccgacctgcctcacccgcacgggcctgttcctgcggttcctctgcagccgcttcccccagggcgcgcagctgcgcggggccctgcggaccctctccctgctggccgcccagggcctctgggcccagatgagcgtgttccaccgcgaggacctggagcggctgggggtccaggagagcgacctccgcctgttcctggacggcgacatcctccggcaggaccgcgtgtccaaggggtgctacagcttcatccacctgtccttccagcagttcctgaccgcgctgttctacgccctggagaaggaggagggcgaggaccgggacggccacgcctgggacatcggggacgtgcagaagctgctcagcggcgaggagcgcctgaagaaccccgacctgatccaggtcgggcacttcctcttcggcctggccaacgagaagcgggcgaaggagctggaggccaccttcgggtgccgcatgtcccccgacatcaagcaggagctcctgcagtgcaaggcccacctccacgccaacaagcccctcagcgtgacggacctgaaggaggtcctgggctgcctctacgagtcccaggaggaggagctggccaaggtggtggtcgcgcccttcaaggagatcagcatccacctgaccaacacctccgaggtgatgcactgcagcttctccctcaagcactgccaggacctgcagaagctgagcctccaggtggccaagggcgtcttcctggagaactacatggacttcgagctggacatcgagttcgagcggtgcacctacctcacgatcccgaactgggcccgccaggacctgcggtccctgcgcctctggaccgacttctgcagcctgttctccagcaactccaacctgaagttcctcgaggtgaagcagagcttcctgtccgacagcagcgtgcggatcctgtgcgaccacgtcacccgctccacgtgccacctccagaaggtggagatcaagaacgtgacccccgacaccgcctaccgggacttctgcctggccttcatcgggaagaagaccctgacccacctcacgctggcgggccacatcgagtgggagcgcaccatgatgctgatgctctgcgacctgctgcggaaccacaagtgcaacctccagtacctgcgcctcgggggccactgcgccacccccgagcagtgggccgagttcttctacgtcctgaaggccaaccagagcctgaagcacctccgcctgtccgccaacgtgctgctggacgagggggcgatgctcctgtacaagaccatgacccggccgaagcacttcctgcagatgctcagcctggagaactgccgcctgacggaggcctcctgcaaggacctcgccgccgtgctggtcgtgagcaagaagctgacccacctctgcctggcgaagaaccccatcggcgacaccggcgtgaagttcctgtgcgaggggctctcctaccccgactgcaagctgcagaccctggtcctccagcagtgcagcatcacgaagctgggctgccggtacctgtccgaggccctccaggaggcctgcagcctgaccaacctggacctctccatcaaccagatcgcccgcgggctgtggatcctgtgccaggccctcgagaaccccaactgcaacctgaagcacctccggctgaagacctacgagaccaacctggagatcaagaagctgctggaggaggtgaaggagaagaacccgaagctcacgatcgactgcaacgcgagcggcgccaccgccccgccctgctgcgacttcttctgctga

SEQ ID NO: 9098 - RNA, 2943 nt, synthetic construct
  misc_feature 1..2943: note = derived and/or modified sequence opt2 fromNALP7__Homo_sapiens__AAL69963
  source 1..2943: mol_type = other RNA
atgacctccccccagctcgagtggaccctccagaccctcctcgagcagctcaacgaggacgagctcaagtccttcaagtccctcctctgggccttccccctcgaggacgtcctccagaagaccccctggtccgaggtcgaggaggccgacggcaagaagctcgccgagatcctcgtcaacacctcctccgagaactggatccgcaacgccaccgtcaacatcctcgaggagatgaacctcaccgagctctgcaagatggccaaggccgagatgatggaggacggccaggtccaggagatcgacaaccccgagctcggcgacgccgaggaggactccgagctcgccaagcccggcgagaaggagggctggcgcaactccatggagaagcagtccctcgtctggaagaacaccttctggcagggcgacatcgacaacttccacgacgacgtcaccctccgcaaccagcgcttcatccccttcctcaacccccgcaccccccgcaagctcaccccctacaccgtcgtcctccacggccccgccggcgtcggcaagaccaccctcgccaagaagtgcatgctcgactggaccgactgcaacctctcccccaccctccgctacgccttctacctctcctgcaaggagctctcccgcatgggcccctgctccttcgccgagctcatctccaaggactggcccgagctccaggacgacatcccctccatcctcgcccaggcccagcgcatcctcttcgtcgtcgacggcctcgacgagctcaaggtcccccccggcgccctcatccaggacatctgcggcgactgggagaagaagaagcccgtccccgtcctcctcggctccctcctcaagcgcaagatgctcccccgcgccgccctcctcgtcaccacccgcccccgcgccctccgcgacctccagctcctcgcccagcagcccatctacgtccgcgtcgagggcttcctcgaggaggaccgccgcgcctacttcctccgccacttcggcgacgaggaccaggccatgcgcgccttcgagctcatgcgctccaacgccgccctcttccagctcggctccgcccccgccgtctgctggatcgtctgcaccaccctcaagctccagatggagaagggcgaggaccccgtccccacctgcctcacccgcaccggcctcttcctccgcttcctctgctcccgcttcccccagggcgcccagctccgcggcgccctccgcaccctctccctcctcgccgcccagggcctctgggcccagatgtccgtcttccaccgcgaggacctcgagcgcctcggcgtccaggagtccgacctccgcctcttcctcgacggcgacatcctccgccaggaccgcgtctccaagggctgctactccttcatccacctctccttccagcagttcctcaccgccctcttctacgccctcgagaaggaggagggcgaggaccgcgacggccacgcctgggacatcggcgacgtccagaagctcctctccggcgaggagcgcctcaagaaccccgacctcatccaggtcggccacttcctcttcggcctcgccaacgagaagcgcgccaaggagctcgaggccaccttcggctgccgcatgtcccccgacatcaagcaggagctcctccagtgcaaggcccacctccacgccaacaagcccctctccgtcaccgacctcaaggaggtcctcggctgcctctacgagtcccaggaggaggagctcgccaaggtcgtcgtcgcccccttcaaggagatctccatccacctcaccaacacctccgaggtcatgcactgctccttctccctcaagcactgccaggacctccagaagctctccctccaggtcgccaagggcgtcttcctcgagaactacatggacttcgagctcgacatcgagttcgagcgctgcacctacctcaccatccccaactgggcccgccaggacctccgctccctccgcctctggaccgacttctgctccctcttctcctccaactccaacctcaagttcctcgaggtcaagcagtccttcctctccgactcctccgtccgcatcctctgcgaccacgtcacccgctccacctgccacctccagaaggtcgagatcaagaacgtcacccccgacaccgcctaccgcgacttctgcctcgccttcatcggcaagaagaccctcacccacctcaccctcgccggccacatcgagtgggagcgcaccatgatgctcatgctctgcgacctcctccgcaaccacaagtgcaacctccagtacctccgcctcggcggccactgcgccacccccgagcagtgggccgagttcttctacgtcctcaaggccaaccagtccctcaagcacctccgcctctccgccaacgtcctcctcgacgagggcgccatgctcctctacaagaccatgacccgccccaagcacttcctccagatgctctccctcgagaactgccgcctcaccgaggcctcctgcaaggacctcgccgccgtcctcgtcgtctccaagaagctcacccacctctgcctcgccaagaaccccatcggcgacaccggcgtcaagttcctctgcgagggcctctcctaccccgactgcaagctccagaccctcgtcctccagcagtgctccatcaccaagctcggctgccgctacctctccgaggccctccaggaggcctgctccctcaccaacctcgacctctccatcaaccagatcgcccgcggcctctggatcctctgccaggccctcgagaaccccaactgcaacctcaagcacctccgcctcaagacctacgagaccaacctcgagatcaagaagctcctcgaggaggtcaaggagaagaaccccaagctcaccatcgactgcaacgcctccggcgccaccgcccccccctgctgcgacttcttctgctga

SEQ ID NO: 9099 - RNA, 2943 nt, synthetic construct
  misc_feature 1..2943: note = derived and/or modified sequence opt3 fromNALP7__Homo_sapiens__AAL69963
  source 1..2943: mol_type = other RNA
atgaccagcccccagctggaatggacactccaaactcttctggaacagttgaacgaggacgaattaaagtccttcaaatctctgctatgggcctttcctctcgaggatgtgctgcagaagacgccatggtcagaagtcgaggaggctgacggcaaaaagctggcagaaatccttgttaataccagtagcgagaactggattagaaatgccacagtgaacatattggaagagatgaatctcactgagctgtgcaaaatggcgaaggctgaaatgatggaggatgggcaggtacaagaaatcgacaacccggagctgggagatgccgaagaggactccgagctcgcaaagcccggtgaaaaagagggctggagaaattctatggaaaagcagtcgttagtgtggaaaaacaccttctggcagggggatattgacaattttcacgatgacgtcacactgcggaaccagcgcttcatcccttttcttaatccacgaactccccgtaagttgaccccttacacagtggttctgcatggaccagccggcgtgggtaaaaccacgctagctaagaagtgtatgctcgattggactgactgcaacctgtcacccacccttagatatgcattctacctgagctgtaaagagttgagtaggatggggccttgctcctttgccgaactcatttctaaggattggccagagctgcaagacgacatcccgagcatattagctcaggcccagcggatcctgttcgtcgtggatggactcgacgagcttaaagtaccccctggcgcgctgattcaggatatctgtggcgactgggaaaagaaaaagccagttcccgtgttgctagggtccctgctcaaacgcaagatgctgcctagagcagcccttctggtcacaactaggccacgggctttgcgcgatctccaactgttagcccagcagcccatttatgtgcgagtggagggatttctggaagaggacagaagggcatacttcctacggcactttggtgatgaagaccaagctatgcgtgccttcgagctcatgcgctcaaatgcggccctgtttcagcttggcagtgcaccggctgtctgctggatcgtttgtaccacattgaagctgcagatggagaaaggggaagatcctgtgccaacctgcctcacgagaactggactgttccttaggttcctgtgtagccggtttccccagggcgcccaattgcgaggtgctctccgcacactgtctttactggccgcacaggggctatgggcccagatgtccgtattccatagagaggacctcgaaaggctgggagtgcaggagtcagatcttcggttgtttctggacggcgacatactccgccaagatagagtcagcaagggctgctatagtttcattcacctgtcttttcagcagttcttaaccgctctgttttacgcgcttgagaaagaagagggggaagacagggatggacatgcatgggacatcggtgatgtgcagaagttgctctccggcgaggaacgtctgaaaaaccctgacctaattcaagttgggcacttcctgtttggactcgccaatgagaagcgggctaaggagctggaagccactttcggctgtcgaatgagccccgatatcaaacaggagcttttgcagtgcaaggcacatctgcacgccaacaaaccattatcggtgacagacctcaaggaagtcctgggttgcctttatgagtctcaggaagaggagctggctaaagtggtagttgccccctttaaggaaatctccattcacttgaccaacacgtcagaggtgatgcattgtagtttcagcctcaagcactgccaagatctgcagaaactatccctgcaggtcgcaaagggggtgtttctcgaaaattacatggacttcgagctggatatagagttcgaaagatgtacctaccttacaatccctaactgggcgaggcaagacttgcgctctctgcggttatggactgatttttgcagcctcttctcaagtaattccaacctgaaatttcttgaggtcaagcagagcttcctgtctgactcaagtgtgaggattctatgtgaccacgttaccaggagcacatgccatctccagaaagtggaaatcaagaatgtaactccagataccgcttatcgcgacttttgtctggccttcataggcaagaaaacattgacccacctgactttagcaggacatattgagtgggaacgaacgatgatgctcatgctgtgcgatcttctgcggaaccacaagtgtaatttgcagtacctccgtctgggcgggcattgcgccacaccggagcaatgggctgagtttttctatgtcctaaaagccaaccagtccctgaagcaccttagactctctgcaaatgtgctgttggacgaaggagctatgctgttatacaaaaccatgactaggcccaagcactttctccagatgctgtcgcttgagaactgtcgcctgaccgaagccagctgcaaagatttggcggccgttctcgtggtctccaagaagctgacacatctatgcctggctaaaaatcctatcggtgacaccggcgtgaagttcctttgtgaggggctctcatatccagattgcaaactgcagactttggtattacaacagtgtagtatcacaaagctgggatgccggtacctctctgaagcactgcaggaggcctgtagccttacgaacctggacttgtccattaatcagatcgctagaggcctatggattctgtgccaagccctcgagaaccccaattgtaacctgaaacaccttaggttaaagacctatgaaactaacctggagataaagaaactcttggaagaggtgaaggagaaaaatcctaagctgacaatcgattgcaacgcatcaggtgcgaccgccccaccctgttgcgactttttctgttga

SEQ ID NO: 9100 - RNA, 2943 nt, synthetic construct
  misc_feature 1..2943: note = derived and/or modified sequence opt4 fromNALP7__Homo_sapiens__AAL69963
  source 1..2943: mol_type = other RNA
atgaccagcccccagctggagtggaccctgcagaccctgctggagcagctgaacgaggacgagctgaagagcttcaagagcctgctgtgggccttccccctggaggacgtgctgcagaagaccccctggagcgaggtggaggaggccgacggcaagaagctggccgagatcctggtgaacaccagcagcgagaactggatcagaaacgccaccgtgaacatcctggaggagatgaacctgaccgagctgtgcaagatggccaaggccgagatgatggaggacggccaggtgcaggagatcgacaaccccgagctgggcgacgccgaggaggacagcgagctggccaagcccggcgagaaggagggctggagaaacagcatggagaagcagagcctggtgtggaagaacaccttctggcagggcgacatcgacaacttccacgacgacgtgaccctgagaaaccagagattcatccccttcctgaaccccagaacccccagaaagctgaccccctacaccgtggtgctgcacggccccgccggcgtgggcaagaccaccctggccaagaagtgcatgctggactggaccgactgcaacctgagccccaccctgagatacgccttctacctgagctgcaaggagctgagcagaatgggcccctgcagcttcgccgagctgatcagcaaggactggcccgagctgcaggacgacatccccagcatcctggcccaggcccagagaatcctgttcgtggtggacggcctggacgagctgaaggtgccccccggcgccctgatccaggacatctgcggcgactgggagaagaagaagcccgtgcccgtgctgctgggcagcctgctgaagagaaagatgctgcccagagccgccctgctggtgaccaccagacccagagccctgagagacctgcagctgctggcccagcagcccatctacgtgagagtggagggcttcctggaggaggacagaagagcctacttcctgagacacttcggcgacgaggaccaggccatgagagccttcgagctgatgagaagcaacgccgccctgttccagctgggcagcgcccccgccgtgtgctggatcgtgtgcaccaccctgaagctgcagatggagaagggcgaggaccccgtgcccacctgcctgaccagaaccggcctgttcctgagattcctgtgcagcagattcccccagggcgcccagctgagaggcgccctgagaaccctgagcctgctggccgcccagggcctgtgggcccagatgagcgtgttccacagagaggacctggagagactgggcgtgcaggagagcgacctgagactgttcctggacggcgacatcctgagacaggacagagtgagcaagggctgctacagcttcatccacctgagcttccagcagttcctgaccgccctgttctacgccctggagaaggaggagggcgaggacagagacggccacgcctgggacatcggcgacgtgcagaagctgctgagcggcgaggagagactgaagaaccccgacctgatccaggtgggccacttcctgttcggcctggccaacgagaagagagccaaggagctggaggccaccttcggctgcagaatgagccccgacatcaagcaggagctgctgcagtgcaaggcccacctgcacgccaacaagcccctgagcgtgaccgacctgaaggaggtgctgggctgcctgtacgagagccaggaggaggagctggccaaggtggtggtggcccccttcaaggagatcagcatccacctgaccaacaccagcgaggtgatgcactgcagcttcagcctgaagcactgccaggacctgcagaagctgagcctgcaggtggccaagggcgtgttcctggagaactacatggacttcgagctggacatcgagttcgagagatgcacctacctgaccatccccaactgggccagacaggacctgagaagcctgagactgtggaccgacttctgcagcctgttcagcagcaacagcaacctgaagttcctggaggtgaagcagagcttcctgagcgacagcagcgtgagaatcctgtgcgaccacgtgaccagaagcacctgccacctgcagaaggtggagatcaagaacgtgacccccgacaccgcctacagagacttctgcctggccttcatcggcaagaagaccctgacccacctgaccctggccggccacatcgagtgggagagaaccatgatgctgatgctgtgcgacctgctgagaaaccacaagtgcaacctgcagtacctgagactgggcggccactgcgccacccccgagcagtgggccgagttcttctacgtgctgaaggccaaccagagcctgaagcacctgagactgagcgccaacgtgctgctggacgagggcgccatgctgctgtacaagaccatgaccagacccaagcacttcctgcagatgctgagcctggagaactgcagactgaccgaggccagctgcaaggacctggccgccgtgctggtggtgagcaagaagctgacccacctgtgcctggccaagaaccccatcggcgacaccggcgtgaagttcctgtgcgagggcctgagctaccccgactgcaagctgcagaccctggtgctgcagcagtgcagcatcaccaagctgggctgcagatacctgagcgaggccctgcaggaggcctgcagcctgaccaacctggacctgagcatcaaccagatcgccagaggcctgtggatcctgtgccaggccctggagaaccccaactgcaacctgaagcacctgagactgaagacctacgagaccaacctggagatcaagaagctgctggaggaggtgaaggagaagaaccccaagctgaccatcgactgcaacgccagcggcgccaccgcccccccctgctgcgacttcttctgctga

SEQ ID NO: 9101 - RNA, 2943 nt, synthetic construct
  misc_feature 1..2943: note = derived and/or modified sequence opt5 fromNALP7__Homo_sapiens__AAL69963
  source 1..2943: mol_type = other RNA
atgaccagcccccagctggagtggacactccaaacgctgcttgaacagctgaacgaggacgaactcaagtccttcaaatctctgctttgggcctttcccctggaggatgtgctccagaagaccccgtggagcgaagtcgaggaggctgacggcaaaaagctggccgaaatcctggttaatacatcctctgagaactggattagaaatgcgaccgtgaacatcctcgaagagatgaatctgacagagctttgcaaaatggctaaggccgaaatgatggaggatggacaggtgcaagaaattgacaaccccgagctgggggatgccgaagaggacagcgagctcgctaagcctggcgaaaaagaggggtggcgcaattccatggaaaagcagtctctggtctggaaaaacaccttctggcagggagatatcgacaattttcacgatgacgtgacacttcggaaccagagattcattccctttctgaatcctcggacgccccgcaagctcaccccttacaccgttgtgctgcacggcccggccggggtcggaaaaacaaccctggctaagaagtgtatgctcgattggacagactgcaacctgagccccacccttagatatgccttctacctgtcctgtaaagagctcagccggatgggcccttgctcttttgcggaactgatctccaaggattggcccgagcttcaagacgacatccctagcattctggcccaggctcagcgcatcctcttcgtggttgatggcctggacgagctgaaagtgcccccgggggccctcattcaggatatctgtggagactgggaaaagaaaaagcctgtccccgtgctgcttggctctctgctcaaaagaaagatgctgcctcgggctgcccttctggtgacgacacgccccagagcgctccgggatctgcaactgctcgcccagcagcccatttatgtccgcgttgaggggtttctggaagaggacagacgggcttacttccttcgccactttggagatgaagaccaagccatgagagctttcgagctgatgcggtccaatgccgccctctttcagctgggcagcgctcctgcggtgtgctggatcgtgtgtaccacactgaaacttcagatggagaaaggggaagatccggtccctacctgcctcaccagaacaggactgttcctgcgcttcctctgttctcggtttccccagggcgcccaactgagaggcgcccttcgcacgctgtccctcctggctgcccaggggctgtgggctcagatgagcgtgttccatcgggaggaccttgaaagactcggagttcaggagtccgatctgcgcctgtttctcgacggcgacattctgcggcaagatagagtgtctaaggggtgctatagcttcatccacctttcctttcagcagttcctgaccgccctcttttacgcgctggagaaagaagagggagaagaccgcgatggccatgcttgggacatcggggatgtccagaagctgcttagcggagaggaacggctcaaaaaccccgacctgattcaagtgggccacttcctgtttggcctcgccaatgagaagagagccaaggagctggaagctacattcgggtgtcgcatgtctcctgatatcaaacaggagcttctgcagtgcaaggcccacctccatgctaacaaacccctgtccgttaccgacctgaaggaagtgcttggatgcctctatgagagccaggaagaggagctggccaaagtcgtggtcgcgccgtttaaggaaatttctatccacctgacaaacaccagcgaggtgatgcattgttccttctctctcaagcactgccaagatctgcagaaacttagcctgcaggttgccaagggcgtgtttctcgaaaattacatggacttcgagctggatattgagttcgaacggtgtacgtacctgacaatccctaactgggctagacaagaccttcggtccctgcgcctctggaccgatttttgcagcctgttctcttccaatagcaacctcaaatttctggaggtcaagcagtctttcctttccgacagctccgtgagaatcctgtgtgaccacgttacccggtctacatgccatctccagaaagtggaaattaagaatgtcacccccgatacagcctatagagacttttgtctggctttcatcgggaagaaaacgctgacccaccttacactggccggacatattgagtgggaacgcaccatgatgctcatgctgtgcgatctcctgcggaaccacaagtgtaatcttcagtacctgagactcggcgggcattgcgcgacacctgagcaatgggccgagtttttctatgtgctgaaagctaaccagagcctgaagcaccttcgcctgtccgccaatgtgctcctggacgaaggcgctatgctcctgtacaaaaccatgacgagacccaagcactttcttcagatgctgtctctggagaactgtcggctcaccgaagccagctgcaaagatctggccgctgttcttgtcgtgtccaagaagctgacacatctctgcctggcgaaaaatcctatcggagacaccggcgtgaagttcctctgtgaggggctgagctatcccgattgcaaacttcagacactggtcctgcaacagtgttctattaccaagctcggatgccgctacctgtccgaagcccttcaggaggcttgtagcctgacgaacctcgacctgtctatcaatcagatcgccagaggcctctggattctgtgccaagcccttgagaacccgaattgtaacctgaaacatctgcggctcaagacatatgaaaccaacctggagatcaagaaacttctggaagaggtgaaggaaaagaatcctaagctcacaattgattgcaacgcttccggggccaccgcgcctccctgttgcgactttttctgttga

SEQ ID NO: 9102 - protein, 1048 aa, synthetic construct
  REGION 1..1048: note = NALP8__Homo_sapiens__Q86W28
MSDVNPPSDTPIPFSSSSTHSSHIPPWTFSCYPGSPCENGVMLYMRNVSHEELQRFKQLLLTELSTGTMPITWDQVETASWAEVVHLLIERFPGRRAWDVTSNIFAIMNCDKMCVVVRREINAILPTLEPEDLNVGETQVNLEEGESGKIRRYKSNVMEKFFPIWDITTWPGNQRDFFYQGVHRHEEYLPCLLLPKRPQGRQPKTVAIQGAPGIGKTILAKKVMFEWARNKFYAHKRWCAFYFHCQEVNQTTDQSFSELIEQKWPGSQDLVSKIMSKPDQLLLLLDGFEELTSTLIDRLEDLSEDWRQKLPGSVLLSSLLSKTMLPEATLLIMIRFTSWQTCKPLLKCPSLVTLPGFNTMEKIKYFQMYFGHTEEGDQVLSFAMENTILFSMCRVPVVCWMVCSGLKQQMERGNNLTQSCPNATSVFVRYISSLFPTRAENFSRKIHQAQLEGLCHLAADSMWHRKWVLGKEDLEEAKLDQTGVTAFLGMSILRRIAGEEDHYVFTLVTFQEFFAALFYVLCFPQRLKNFHVLSHVNIQRLIASPRGSKSYLSHMGLFLFGFLNEACASAVEQSFQCKVSFGNKRKLLKVIPLLHKCDPPSPGSGVPQLFYCLHEIREEAFVSQALNDYHKVVLRIGNNKEVQVSAFCLKRCQYLHEVELTVTLNFMNVWKLSSSSHPGSEAPESNGLHRWWQDLCSVFATNDKLEVLTMTNSVLGPPFLKALAAALRHPQCKLQKLLLRRVNSTMLNQDLIGVLTGNQHLRYLEIQHVEVESKAVKLLCRVLRSPRCRLQCLRLEDCLATPRIWTDLGNNLQGNGHLKTLILRKNSLENCGAYYLSVAQLERLSIENCNLTQLTCESLASCLRQSKMLTHLSLAENALKDEGAKHIWNALPHLRCPLQRLVLRKCDLTFNCCQDMISALCKNKTLKSLDLSFNSLKDDGVILLCEALKNPDCTLQILELENCLFTSICCQAMASMLRKNQHLRHLDLSKNAIGVYGILTLCEAFSSQKKREEVIFCIPAWTRITSFSPTPHPPDFTGKSDCLSQINP

SEQ ID NO: 9103 - RNA, 3147 nt, synthetic construct
  misc_feature 1..3147: note = NALP8__Homo_sapiens__DAA01242
  source 1..3147: mol_type = other RNA
atgagtgacgtgaatccaccctctgacacccccattcccttttcatcctcctccactcacagttctcatattccgccctggacattctcttgctaccccggctccccatgtgaaaatggggtcatgctgtacatgagaaacgtgagccatgaggagctacaacggttcaagcagctcttactgactgagctcagtactggcaccatgcccatcacctgggaccaggtcgagacagccagctgggcagaggtggttcatctcttgatagagcgtttccctggacgacgcgcttgggatgtgacttcgaacatctttgccattatgaactgtgataaaatgtgtgttgtagtccgcagagagataaatgccattctgcctaccttggaaccagaggacttgaatgtgggagaaacacaggtgaatctggaggaaggagaatctggtaaaatacggcggtataaatcgaatgtgatggaaaagtttttccccatatgggacattacgacttggcctggaaaccagagggacttcttctaccaaggtgtacacaggcacgaggagtacttaccatgtctgcttctgcccaaaagaccccagggtagacagcccaagaccgtggccatacagggagctcctgggatcggaaaaacaatcctggccaaaaaggtgatgtttgagtgggccagaaacaagttctacgcccacaagcgctggtgtgctttctacttccattgccaagaggtgaaccagacgacagaccagagcttctccgagctgattgagcaaaagtggcctggatctcaggacctcgtgtcaaagattatgtccaaacccgaccaacttctgctgctcttggatggctttgaggagctcacatctaccctcattgacagactggaggacctgagtgaagactggaggcagaaattgcctgggtctgtcctactgagcagtttgctgagcaaaacgatgcttccagaggccacgctactgatcatgataagatttacctcttggcagacatgcaagcccttgctgaaatgtccctctctcgtaacccttccggggtttaatacgatggaaaaaatcaagtatttccagatgtattttggacacacagaggagggagaccaagtcttgagtttcgccatggaaaacaccattctcttctccatgtgccgggtccctgtggtttgctggatggtctgctctggtctgaaacagcaaatggagagaggaaacaatctcacacagtcatgtccaaatgccacctctgtgttcgtccggtatatttctagcttgtttcccaccagagctgagaacttttccagaaagatccaccaagcacaactggaaggtctgtgtcacttggccgcagacagcatgtggcacaggaaatgggtgttaggtaaagaagatcttgaggaagccaagctggatcagacgggagtcaccgccttccttggcatgagtattcttcggagaattgcaggtgaggaagaccactatgtctttaccctcgtgacttttcaggaattttttgcggccttgttttatgttctctgtttcccacaaagactcaaaaattttcatgtgttgagccacgtgaatatccagcgcctgatagcgagtcccagaggaagcaaaagctatctctctcacatgggacttttcttattcggttttctgaacgaggcctgcgcttcggccgtggaacagtcattccaatgcaaggtgtctttcggtaataagaggaaactgctgaaagtcatacctctgttgcataaatgtgacccaccttctccgggcagtggggtcccgcagttattctactgtctgcatgaaatccgggaggaagcctttgtaagccaagccctaaatgattatcataaagttgtcttgagaattggcaacaacaaagaagttcaagtgtctgctttttgcctgaagcggtgtcaatatttgcatgaggtggaactgaccgtcaccctgaacttcatgaacgtgtggaagctcagctccagctcccatcctggctctgaagcgccagagagcaatgggctgcatcgttggtggcaagacttatgctctgtgtttgcaacgaatgataagctggaagtcctgactatgaccaacagtgttttggggcctccttttttgaaggctctcgcggccgcactgaggcaccctcagtgcaaactgcaaaagctactcctaaggcgtgtgaatagcaccatgttgaaccaggacttaatcggtgttttgacggggaaccagcatctgagatacttggaaatacaacatgtggaagtggagtccaaagctgtgaagcttctatgcagggtgctgagatccccccggtgccgtctgcagtgtctcaggttggaagactgcttggccacccctagaatttggactgatcttggcaataatcttcaaggtaacgggcatctaaagactctcatactaagaaaaaactccctggagaactgtggggcgtattacctgtctgtggcccagctggagaggctgtcgatagagaactgcaaccttacacagcttacttgtgaaagccttgcctcctgtctcaggcagagtaagatgctgacccacctgagcttggcagaaaacgccttgaaagatgaaggggccaagcatatttggaatgccctgccacacctgagatgtcctctgcagaggctggtactgagaaagtgtgacttgacctttaattgctgtcaggatatgatctctgcgctctgtaaaaataaaaccctgaaaagtcttgacctaagttttaatagcctgaaggatgatggggtgatcctgctgtgtgaggccctgaagaaccctgactgtacattacagatcctggagctggaaaactgcctgttcacctccatctgctgccaggccatggcttccatgctccgcaaaaaccaacatctgagacatctggacttgagcaagaatgcgattggagtctatggtattctgaccttgtgcgaggccttctcaagccaaaagaagagagaagaggtcattttctgtattcctgcctggactcgaataactagcttctccccaactcctcacccacccgacttcacgggaaaaagtgactgcctatcccagattaatccttag

SEQ ID NO: 9104 - RNA, 3147 nt, synthetic construct
  misc_feature 1..3147: note = derived and/or modified sequence opt1 fromNALP8__Homo_sapiens__DAA01242
  source 1..3147: mol_type = other RNA
atgagcgacgtgaacccgccctccgacacccccatccccttcagctccagctccacccacagctcccacatcccgccctggacgttcagctgctaccccggctccccctgcgagaacggggtcatgctgtacatgcgcaacgtgagccacgaggagctccagcggttcaagcagctgctgctcaccgagctgtccaccggcaccatgcccatcacgtgggaccaggtggagaccgccagctgggccgaggtcgtgcacctcctcatcgagcgcttccccgggcggcgcgcgtgggacgtgacctccaacatcttcgccatcatgaactgcgacaagatgtgcgtcgtggtgcggcgcgagatcaacgccatcctgcccaccctggagcccgaggacctcaacgtcggcgagacccaggtgaacctggaggagggggagagcggcaagatccggcgctacaagtccaacgtgatggagaagttcttccccatctgggacatcaccacctggccgggcaaccagcgggacttcttctaccagggggtccaccgccacgaggagtacctgccctgcctcctgctgcccaagcggccccagggccgccagccgaagaccgtggccatccagggggcccccggcatcgggaagacgatcctcgcgaagaaggtgatgttcgagtgggcccggaacaagttctacgcccacaagcgctggtgcgccttctacttccactgccaggaggtcaaccagaccaccgaccagagcttctccgagctgatcgagcagaagtggcccggcagccaggacctggtgtccaagatcatgagcaagcccgaccagctcctgctgctcctggacggcttcgaggagctgaccagcacgctcatcgaccggctggaggacctgtccgaggactggcgccagaagctcccggggagcgtgctgctgtccagcctcctgtccaagaccatgctgcccgaggcgaccctcctgatcatgatccggttcaccagctggcagacgtgcaagcccctgctcaagtgcccctccctggtcaccctgccgggcttcaacaccatggagaagatcaagtacttccagatgtacttcgggcacaccgaggagggcgaccaggtgctcagcttcgccatggagaacacgatcctgttctccatgtgccgcgtgcccgtcgtgtgctggatggtgtgcagcggcctgaagcagcagatggagcgggggaacaacctcacccagtcctgccccaacgccaccagcgtcttcgtgcgctacatctccagcctgttccccacccgggccgagaacttctcccgcaagatccaccaggcccagctggagggcctctgccacctggcggccgacagcatgtggcaccgcaagtgggtcctggggaaggaggacctcgaggaggccaagctggaccagacgggcgtgaccgccttcctggggatgtccatcctgcggcgcatcgccggcgaggaggaccactacgtgttcaccctcgtcaccttccaggagttcttcgcggccctgttctacgtgctgtgcttcccgcagcggctcaagaacttccacgtgctgagccacgtcaacatccagcgcctgatcgccagcccccggggctccaagagctacctctcccacatggggctgttcctgttcggcttcctcaacgaggcctgcgccagcgcggtggagcagtccttccagtgcaaggtgagcttcgggaacaagcgcaagctgctgaaggtcatccccctcctgcacaagtgcgacccgccctcccccggcagcggggtgccccagctgttctactgcctccacgagatccgggaggaggccttcgtgtcccaggccctgaacgactaccacaaggtcgtgctgcgcatcggcaacaacaaggaggtgcaggtcagcgccttctgcctcaagcggtgccagtacctgcacgaggtggagctgacggtgaccctcaacttcatgaacgtctggaagctgtccagctccagccacccgggctccgaggcccccgagagcaacgggctgcaccgctggtggcaggacctctgctccgtgttcgcgaccaacgacaagctggaggtgctgaccatgacgaacagcgtcctcggcccgcccttcctgaaggccctggccgccgcgctccggcacccccagtgcaagctgcagaagctgctcctgcgccgggtgaactccaccatgctgaaccaggacctcatcggggtgctgaccggcaaccagcacctccgctacctggagatccagcacgtcgaggtggagagcaaggccgtgaagctgctgtgccgggtcctccgcagcccccggtgccgcctgcagtgcctgcggctcgaggactgcctggccacgccccgcatctggaccgacctggggaacaacctccagggcaacggccacctgaagacgctgatcctccgcaagaactccctggagaactgcggggcctactacctgagcgtggcccagctcgagcggctgtccatcgagaactgcaacctgacccagctgacctgcgagagcctggcgtcctgcctgcgccagagcaagatgctcacccacctgtccctggccgagaacgccctcaaggacgagggcgccaagcacatctggaacgccctgccccacctccggtgcccgctgcagcgcctggtgctgcggaagtgcgacctcacgttcaactgctgccaggacatgatcagcgcgctgtgcaagaacaagaccctgaagtccctcgacctgagcttcaactccctgaaggacgacggggtcatcctcctgtgcgaggccctgaagaaccccgactgcaccctccagatcctggagctggagaactgcctcttcaccagcatctgctgccaggccatggcctccatgctgcgcaagaaccagcacctccggcacctggacctgagcaagaacgccatcggcgtgtacggcatcctgacgctctgcgaggcgttctccagccagaagaagcgcgaggaggtgatcttctgcatccccgcctggacccggatcacctccttcagccccaccccgcacccgcccgacttcacggggaagtccgactgcctgagccagatcaacccctga

SEQ ID NO: 9105 - RNA, 3147 nt, synthetic construct
  misc_feature 1..3147: note = derived and/or modified sequence opt2 fromNALP8__Homo_sapiens__DAA01242
  source 1..3147: mol_type = other RNA
atgtccgacgtcaaccccccctccgacacccccatccccttctcctcctcctccacccactcctcccacatccccccctggaccttctcctgctaccccggctccccctgcgagaacggcgtcatgctctacatgcgcaacgtctcccacgaggagctccagcgcttcaagcagctcctcctcaccgagctctccaccggcaccatgcccatcacctgggaccaggtcgagaccgcctcctgggccgaggtcgtccacctcctcatcgagcgcttccccggccgccgcgcctgggacgtcacctccaacatcttcgccatcatgaactgcgacaagatgtgcgtcgtcgtccgccgcgagatcaacgccatcctccccaccctcgagcccgaggacctcaacgtcggcgagacccaggtcaacctcgaggagggcgagtccggcaagatccgccgctacaagtccaacgtcatggagaagttcttccccatctgggacatcaccacctggcccggcaaccagcgcgacttcttctaccagggcgtccaccgccacgaggagtacctcccctgcctcctcctccccaagcgcccccagggccgccagcccaagaccgtcgccatccagggcgcccccggcatcggcaagaccatcctcgccaagaaggtcatgttcgagtgggcccgcaacaagttctacgcccacaagcgctggtgcgccttctacttccactgccaggaggtcaaccagaccaccgaccagtccttctccgagctcatcgagcagaagtggcccggctcccaggacctcgtctccaagatcatgtccaagcccgaccagctcctcctcctcctcgacggcttcgaggagctcacctccaccctcatcgaccgcctcgaggacctctccgaggactggcgccagaagctccccggctccgtcctcctctcctccctcctctccaagaccatgctccccgaggccaccctcctcatcatgatccgcttcacctcctggcagacctgcaagcccctcctcaagtgcccctccctcgtcaccctccccggcttcaacaccatggagaagatcaagtacttccagatgtacttcggccacaccgaggagggcgaccaggtcctctccttcgccatggagaacaccatcctcttctccatgtgccgcgtccccgtcgtctgctggatggtctgctccggcctcaagcagcagatggagcgcggcaacaacctcacccagtcctgccccaacgccacctccgtcttcgtccgctacatctcctccctcttccccacccgcgccgagaacttctcccgcaagatccaccaggcccagctcgagggcctctgccacctcgccgccgactccatgtggcaccgcaagtgggtcctcggcaaggaggacctcgaggaggccaagctcgaccagaccggcgtcaccgccttcctcggcatgtccatcctccgccgcatcgccggcgaggaggaccactacgtcttcaccctcgtcaccttccaggagttcttcgccgccctcttctacgtcctctgcttcccccagcgcctcaagaacttccacgtcctctcccacgtcaacatccagcgcctcatcgcctccccccgcggctccaagtcctacctctcccacatgggcctcttcctcttcggcttcctcaacgaggcctgcgcctccgccgtcgagcagtccttccagtgcaaggtctccttcggcaacaagcgcaagctcctcaaggtcatccccctcctccacaagtgcgaccccccctcccccggctccggcgtcccccagctcttctactgcctccacgagatccgcgaggaggccttcgtctcccaggccctcaacgactaccacaaggtcgtcctccgcatcggcaacaacaaggaggtccaggtctccgccttctgcctcaagcgctgccagtacctccacgaggtcgagctcaccgtcaccctcaacttcatgaacgtctggaagctctcctcctcctcccaccccggctccgaggcccccgagtccaacggcctccaccgctggtggcaggacctctgctccgtcttcgccaccaacgacaagctcgaggtcctcaccatgaccaactccgtcctcggcccccccttcctcaaggccctcgccgccgccctccgccacccccagtgcaagctccagaagctcctcctccgccgcgtcaactccaccatgctcaaccaggacctcatcggcgtcctcaccggcaaccagcacctccgctacctcgagatccagcacgtcgaggtcgagtccaaggccgtcaagctcctctgccgcgtcctccgctccccccgctgccgcctccagtgcctccgcctcgaggactgcctcgccaccccccgcatctggaccgacctcggcaacaacctccagggcaacggccacctcaagaccctcatcctccgcaagaactccctcgagaactgcggcgcctactacctctccgtcgcccagctcgagcgcctctccatcgagaactgcaacctcacccagctcacctgcgagtccctcgcctcctgcctccgccagtccaagatgctcacccacctctccctcgccgagaacgccctcaaggacgagggcgccaagcacatctggaacgccctcccccacctccgctgccccctccagcgcctcgtcctccgcaagtgcgacctcaccttcaactgctgccaggacatgatctccgccctctgcaagaacaagaccctcaagtccctcgacctctccttcaactccctcaaggacgacggcgtcatcctcctctgcgaggccctcaagaaccccgactgcaccctccagatcctcgagctcgagaactgcctcttcacctccatctgctgccaggccatggcctccatgctccgcaagaaccagcacctccgccacctcgacctctccaagaacgccatcggcgtctacggcatcctcaccctctgcgaggccttctcctcccagaagaagcgcgaggaggtcatcttctgcatccccgcctggacccgcatcacctccttctcccccaccccccacccccccgacttcaccggcaagtccgactgcctctcccagatcaacccctga

SEQ ID NO: 9106 - RNA, 3147 nt, synthetic construct
  misc_feature 1..3147: note = derived and/or modified sequence opt3 fromNALP8__Homo_sapiens__DAA01242
  source 1..3147: mol_type = other RNA
atgagcgacgtgaatcccccttccgataccccaatcccgttctcttcaagtagcacacactcctctcatattcccccttggactttttcgtgctacccaggctcaccctgtgagaacggggtcatgctgtatatgagaaacgttagccacgaggaactccagaggttcaagcaacttctgttgacggaattaagtaccggaacaatgcctataacttgggaccaggtggagaccgcctcctgggctgaagtagtgcatctgctaatcgagcggtttccaggtcgccgagcatgggatgtcacatctaatattttcgccatcatgaactgcgacaaaatgtgtgtggttgtgcgtagagagattaatgcgatcctccccaccctggaacctgaggatcttaacgtcggcgaaactcaggtgaatctggaggagggggaaagcggaaagataaggcggtacaaatccaacgtaatggagaagtttttcccaatctgggacattacaacctggccgggcaatcagcgcgactttttctatcaaggtgttcacagacatgaagagtacttgccctgcctcctgctgcctaaaaggccacaggggcggcagcccaagacggtggctatccagggagcccctggcattggcaagactatcctcgcaaagaaggtcatgtttgaatgggcccgcaacaaattctatgctcacaagcgatggtgtgcattttacttccactgccaagaggtgaatcagaccacagatcagtcatttagtgagttaatagaacagaaatggccagggagccaagatctggtgtctaagattatgtccaagcccgaccagcttttgctgctactcgatggattcgaggaactgacttcaacccttatcgacagactggaggatttgagcgaagactggaggcagaaactcccgggtagtgtcctgttatcttccctgctcagcaagacaatgcttcctgaggccaccctgttgattatgatccggttcacgtcgtggcaaacttgtaaacccctactgaagtgcccatctctcgttacactgcctggctttaacaccatggagaaaatcaagtatttccagatgtactttgggcatactgaagagggagaccaggtgctttccttcgctatggaaaatacaattctgttttcaatgtgtcgtgtacccgtggtctgctggatggtgtgtagtggcttgaaacagcaaatggagcgcggtaacaatctcacccagagctgcccaaacgccacgtccgttttcgtgagatacatatctagcctgtttcccaccagggcggaaaacttctcacggaagatccaccaggcacagttagaggggctgtgccatctagccgctgatagtatgtggcaccgaaagtgggtcctcggaaaagaggacctggaagaggccaaacttgatcaaacaggcgtgactgcatttttgggcatgtccattctgcgcagaatcgctggggaagaggaccactatgtattcaccctcgttacatttcaggagttctttgccgcgctgttctacgtgctttgtttccctcagaggctgaaaaattttcatgtcttgagccacgtgaacatacagcggctcattgcctctccacgcggatcaaagagttatctgagccatatgggtttattcctgtttggcttcctaaatgaagcatgcgcttccgccgtcgagcaatcttttcagtgtaaagtgtcgttcgggaacaagagaaagctcctgaaagttatcccgcttttgcacaagtgcgatccccctagcccaggatccggcgtgccccagctgttttactgtctccatgaaatcagggaggaggctttcgtatcacaggccctgaatgactatcacaaagtcgtgttacgtattggtaacaataaggaagttcaagtgagtgcattttgcctgaaacggtgtcagtaccttcacgaggtcgaattgactgtgaccctcaacttcatgaatgtatggaagctgtctagctcctcacatcctgggagcgaggccccagaatctaacggcctacaccgatggtggcaggatctgtgctccgtgtttgctacaaatgacaagctcgaggttctgaccatgactaacagtgtccttggacccccgttcttgaaagcgctggcagccgctttaagacatcctcaatgtaagctccagaaactgcttctgaggcgcgtgaatagcacgatgttgaaccaggatctcatcggcgtgctgacagggaatcagcacctacggtatctggaaattcaacacgtcgaggttgagtctaaggccgtgaaactcctgtgcagagtgcttaggtccccacgctgtcgattgcagtgcctgcggttagaagactgcctcgcaactccccgtatatggaccgatctgggaaacaaccttcagggtaatggccatctgaagaccctaatcctcagaaagaactcactggagaattgtggggcctactacttgagtgtagctcagctggaaaggttaagcattgagaactgcaatctcacacaactgacctgtgaatcgcttgcctcctgcctgcgccagtctaaaatgttgactcacctcagcctggcagagaacgcgctaaaggacgagggagctaaacatatctggaatgccctgcctcaccttcggtgtcccctccagagactggtcttgaggaagtgcgacctgacatttaactgttgccaggatatgatctcagcattatgtaaaaataagacgctcaaaagtctggacctttccttcaactctctgaaggatgacggcgtgattttgctctgcgaagccctgaagaatccagattgtaccctacaaatactggagcttgaaaactgcctcttcactagcatctgctgtcaggctatggcctccatgctgcgcaaaaatcagcatttgcgacacttagacctgtcaaagaacgcaattggtgtttatgggatcctcacactgtgcgaggcttttagcagtcagaaaaagcgggaggaagtgattttctgtatccctgcctggaccagaataacatctttttcccccactccacacccgcctgatttcaccggcaaaagcgactgcctttcgcaaatcaatccctga

SEQ ID NO: 9107 - RNA, 3147 nt, synthetic construct
  misc_feature 1..3147: note = derived and/or modified sequence opt4 fromNALP8__Homo_sapiens__DAA01242
  source 1..3147: mol_type = other RNA
atgagcgacgtgaacccccccagcgacacccccatccccttcagcagcagcagcacccacagcagccacatccccccctggaccttcagctgctaccccggcagcccctgcgagaacggcgtgatgctgtacatgagaaacgtgagccacgaggagctgcagagattcaagcagctgctgctgaccgagctgagcaccggcaccatgcccatcacctgggaccaggtggagaccgccagctgggccgaggtggtgcacctgctgatcgagagattccccggcagaagagcctgggacgtgaccagcaacatcttcgccatcatgaactgcgacaagatgtgcgtggtggtgagaagagagatcaacgccatcctgcccaccctggagcccgaggacctgaacgtgggcgagacccaggtgaacctggaggagggcgagagcggcaagatcagaagatacaagagcaacgtgatggagaagttcttccccatctgggacatcaccacctggcccggcaaccagagagacttcttctaccagggcgtgcacagacacgaggagtacctgccctgcctgctgctgcccaagagaccccagggcagacagcccaagaccgtggccatccagggcgcccccggcatcggcaagaccatcctggccaagaaggtgatgttcgagtgggccagaaacaagttctacgcccacaagagatggtgcgccttctacttccactgccaggaggtgaaccagaccaccgaccagagcttcagcgagctgatcgagcagaagtggcccggcagccaggacctggtgagcaagatcatgagcaagcccgaccagctgctgctgctgctggacggcttcgaggagctgaccagcaccctgatcgacagactggaggacctgagcgaggactggagacagaagctgcccggcagcgtgctgctgagcagcctgctgagcaagaccatgctgcccgaggccaccctgctgatcatgatcagattcaccagctggcagacctgcaagcccctgctgaagtgccccagcctggtgaccctgcccggcttcaacaccatggagaagatcaagtacttccagatgtacttcggccacaccgaggagggcgaccaggtgctgagcttcgccatggagaacaccatcctgttcagcatgtgcagagtgcccgtggtgtgctggatggtgtgcagcggcctgaagcagcagatggagagaggcaacaacctgacccagagctgccccaacgccaccagcgtgttcgtgagatacatcagcagcctgttccccaccagagccgagaacttcagcagaaagatccaccaggcccagctggagggcctgtgccacctggccgccgacagcatgtggcacagaaagtgggtgctgggcaaggaggacctggaggaggccaagctggaccagaccggcgtgaccgccttcctgggcatgagcatcctgagaagaatcgccggcgaggaggaccactacgtgttcaccctggtgaccttccaggagttcttcgccgccctgttctacgtgctgtgcttcccccagagactgaagaacttccacgtgctgagccacgtgaacatccagagactgatcgccagccccagaggcagcaagagctacctgagccacatgggcctgttcctgttcggcttcctgaacgaggcctgcgccagcgccgtggagcagagcttccagtgcaaggtgagcttcggcaacaagagaaagctgctgaaggtgatccccctgctgcacaagtgcgacccccccagccccggcagcggcgtgccccagctgttctactgcctgcacgagatcagagaggaggccttcgtgagccaggccctgaacgactaccacaaggtggtgctgagaatcggcaacaacaaggaggtgcaggtgagcgccttctgcctgaagagatgccagtacctgcacgaggtggagctgaccgtgaccctgaacttcatgaacgtgtggaagctgagcagcagcagccaccccggcagcgaggcccccgagagcaacggcctgcacagatggtggcaggacctgtgcagcgtgttcgccaccaacgacaagctggaggtgctgaccatgaccaacagcgtgctgggcccccccttcctgaaggccctggccgccgccctgagacacccccagtgcaagctgcagaagctgctgctgagaagagtgaacagcaccatgctgaaccaggacctgatcggcgtgctgaccggcaaccagcacctgagatacctggagatccagcacgtggaggtggagagcaaggccgtgaagctgctgtgcagagtgctgagaagccccagatgcagactgcagtgcctgagactggaggactgcctggccacccccagaatctggaccgacctgggcaacaacctgcagggcaacggccacctgaagaccctgatcctgagaaagaacagcctggagaactgcggcgcctactacctgagcgtggcccagctggagagactgagcatcgagaactgcaacctgacccagctgacctgcgagagcctggccagctgcctgagacagagcaagatgctgacccacctgagcctggccgagaacgccctgaaggacgagggcgccaagcacatctggaacgccctgccccacctgagatgccccctgcagagactggtgctgagaaagtgcgacctgaccttcaactgctgccaggacatgatcagcgccctgtgcaagaacaagaccctgaagagcctggacctgagcttcaacagcctgaaggacgacggcgtgatcctgctgtgcgaggccctgaagaaccccgactgcaccctgcagatcctggagctggagaactgcctgttcaccagcatctgctgccaggccatggccagcatgctgagaaagaaccagcacctgagacacctggacctgagcaagaacgccatcggcgtgtacggcatcctgaccctgtgcgaggccttcagcagccagaagaagagagaggaggtgatcttctgcatccccgcctggaccagaatcaccagcttcagccccaccccccacccccccgacttcaccggcaagagcgactgcctgagccagatcaacccctga

SEQ ID NO: 9108 - RNA, 3147 nt, synthetic construct
  misc_feature 1..3147: note = derived and/or modified sequence opt5 fromNALP8__Homo_sapiens__DAA01242
  source 1..3147: mol_type = other RNA
atgagcgacgtgaatcccccttccgataccccgatccccttctctagctcctctacacacagctcccatattcctccctggacgttttcttgctaccctggcagcccctgtgagaacggggtcatgctgtatatgagaaacgtttcccacgaggaactccagcggttcaagcaactgcttctgaccgaactcagcacaggaaccatgcctatcacatgggaccaggtggagaccgcctcttgggctgaagtggtccatctgcttattgagcgctttccgggcagacgggcctgggatgtgacatccaatatcttcgcgattatgaactgcgacaaaatgtgtgttgtggtccgcagagagatcaatgctatcctgcccaccctcgaacctgaggatctgaacgtgggggaaacgcaggttaatctggaggagggagaaagcggcaagattcggcgctacaaatctaacgtgatggagaagtttttccccatctgggacattaccacatggcctgggaatcagagagactttttctatcaaggagtccaccggcatgaagagtacctcccctgcctgcttctgccgaaacgccctcagggcagacagcccaagaccgtggccatccagggcgcccctgggattggaaagacaatcctcgctaaaaaggtgatgtttgaatgggcccggaacaaattctatgctcacaagcgctggtgtgccttttacttccactgccaagaggtcaatcagaccacggatcagtcctttagcgagctgattgaacagaaatggcccggctctcaagatcttgtttccaagatcatgagcaagcccgaccagctgctcctgctgctcgatgggttcgaggaactgacatccacccttatcgacagactggaggatctctctgaagactggcggcagaaactgcctggaagcgtgcttctgtccagcctcctgtctaagacaatgctgccggaggcgaccctcctgattatgatccgcttcacctcctggcaaacatgtaaaccccttctgaagtgccctagcctcgtgacgctgcccggctttaacaccatggagaaaattaagtatttccagatgtactttgggcatacagaagagggagaccaggtcctttctttcgccatggaaaataccatcctgtttagcatgtgtagagtgcctgttgtgtgctggatggtctgttccggcctcaaacagcaaatggagcggggcaacaatctgacacagtcttgccccaacgctaccagcgtgttcgttagatacatttccagcctgtttccgacgcgcgccgaaaacttctctcggaagatccaccaggctcagctcgaggggctgtgccatcttgccgcggattccatgtggcacagaaagtgggtgctgggaaaagaggacctcgaagaggccaagctggatcaaacaggcgtcaccgcttttctggggatgagcatccttcgccggattgccggagaagaggaccactatgtgttcaccctcgtcacatttcaggagttctttgctgccctgttctacgtgctgtgtttccctcagagactcaaaaattttcatgttctgtctcacgtgaacatccagcgccttattgccagcccccggggcagcaagtcctatctgtctcatatgggactcttcctgtttgggttcctgaatgaggcttgcgcgagcgccgtcgaacaatcctttcagtgtaaagtgtctttcggcaacaagagaaaacttctcaaagttatccctctgctgcacaagtgcgatccccctagccccggctccggggtgccgcagctcttttactgtctgcatgaaattcgcgaggaggctttcgtcagccaggcccttaatgactatcacaaagtggtgctgcggatcggaaacaataaggaagttcaagtctctgccttttgcctcaaaagatgtcagtacctgcacgaggtggaactgaccgtgacacttaacttcatgaatgtctggaagctctcctcctcttcccatcctggcagcgaggctcccgaatctaacgggctgcaccgctggtggcaggatctgtgcagcgtgtttgccacgaatgacaagctcgaggttctgaccatgacaaactccgtgcttggaccccctttcctgaaagcgctcgctgccgccctgcggcatccgcaatgtaagctgcagaaacttctcctgagacgggtcaatagcaccatgctgaaccaggatctcatcggcgtgctgacagggaatcagcaccttcgctatctggaaattcaacacgttgaggtggagtctaaggctgtcaaactcctgtgcagagtgctgcggtcccccagatgtcgccttcagtgcctgcggctcgaagactgcctggccacccctagaatctggacggatctcggcaacaacctgcagggaaatggccatcttaagaccctgattctccgcaagaacagcctggagaattgtggggcttactacctgtccgttgcccagcttgaaagactgtctatcgagaactgcaatctcacacaactgacctgtgaaagcctcgcgtcctgcctgcggcagtctaaaatgcttacacacctgagcctcgccgagaacgctctgaaggacgagggagccaaacatatttggaatgctctgccccaccttcgctgtcctctgcagagactcgtgctgcggaagtgcgacctcacctttaactgttgccaggatatgatctccgccctgtgtaaaaataagacgcttaaatctctggacctgagcttcaactccctcaaggatgacggcgtcattctgctttgcgaagcgctgaagaatcccgattgtacactccaaatcctggagctcgaaaactgcctgttcaccagcatctgctgtcaggccatggcttctatgcttcgcaaaaatcagcatctgagacacctggacctctccaagaacgccattggggtgtatggaatcctgacactttgcgaggcttttagctctcaaaagaagcgggaggaagtgattttctgtatccctgcctggacccgcattacctcctttagccccacaccgcaccctcccgatttcacgggcaaatctgactgcctgtcccagatcaatccttga

SEQ ID NO: 9109 - protein, 991 aa, synthetic construct
  REGION 1..991: note = NALP9__Homo_sapiens__Q7RTR0
MAESFFSDFGLLWYLKELRKEEFWKFKELLKQPLEKFELKPIPWAELKKASKEDVAKLLDKHYPGKQAWEVTLNLFLQINRKDLWTKAQEEMRNKLNPYRKHMKETFQLIWEKETCLHVPEHFYKETMKNEYKELNDAYTAAARRHTVVLEGPDGIGKTTLLRKVMLDWAEGNLWKDRFTFVFFLNVCEMNGIAETSLLELLSRDWPESSEKIEDIFSQPERILFIMDGFEQLKFNLQLKADLSDDWRQRQPMPIILSSLLQKKMLPESSLLIALGKLAMQKHYFMLRHPKLIKLLGFSESEKKSYFSYFFGEKSKALKVFNFVRDNGPLFILCHNPFTCWLVCTCVKQRLERGEDLEINSQNTTYLYASFLTTVFKAGSQSFPPKVNRARLKSLCALAAEGIWTYTFVFSHGDLRRNGLSESEGVMWVGMRLLQRRGDCFAFMHLCIQEFCAAMFYLLKRPKDDPNPAIGSITQLVRASVVQPQTLLTQVGIFMFGISTEEIVSMLETSFGFPLSKDLKQEITQCLESLSQCEADREAIAFQELFIGLFETQEKEFVTKVMNFFEEVFIYIGNIEHLVIASFCLKHCQHLTTLRMCVENIFPDDSGCISDYNEKLVYWRELCSMFITNKNFQILDMENTSLDDPSLAILCKALAQPVCKLRKLIFTSVYFGHDSELFKAVLHNPHLKLLSLYGTSLSQSDIRHLCETLKHPMCKIEELILGKCDISSEVCEDIASVLACNSKLKHLSLVENPLRDEGMTLLCEALKHSHCALERLMLMYCCLTSVSCDSISEVLLCSKSLSLLDLGSNALEDNGVASLCAALKHPGCSIRELWLMGCFLTSDSCKDIAAVLICNGKLKTLKLGHNEIGDTGVRQLCAALQHPHCKLECLGLQTCPITRACCDDIAAALIACKTLRSLNLDWIALDADAVVVLCEALSHPDCALQMLGLHKSGFDEETQKILMSVEEKIPHLTISHGPWIDEEYKIRGVLL

SEQ ID NO: 9110 - RNA, 2976 nt, synthetic construct
  misc_feature 1..2976: note = NALP9__Homo_sapiens__AAI36584
  source 1..2976: mol_type = other RNA
atggcagaatcttttttttcggattttggcttgttgtggtatctgaaggagctcagaaaggaagagttttggaaatttaaggagctcctcaaacaacctttggagaaatttgaactcaagccaatcccctgggctgagctgaagaaggcctccaaagaagatgtagcaaagctgctggacaaacattacccaggaaagcaggcatgggaggtaacactgaacctgtttctacagatcaataggaaagatctctggacaaaggctcaggaagagatgagaaataagctaaacccatacagaaagcatatgaaggaaacatttcaactcatatgggagaaggaaacctgtcttcacgtccctgagcatttctacaaagaaaccatgaaaaatgagtataaagaattgaatgacgcatatactgctgcggctagacgacacactgtggtcctggaaggtcctgatggaattggaaaaacaacccttttaagaaaagtgatgttggactgggcagagggaaacttatggaaggacaggttcacatttgtgtttttcctcaatgtctgtgaaatgaacggtatcgcagagaccagcttactggagctcctctctagggactggccggagtcttcagagaagatcgaagacattttttcccagccagagagaattctgttcatcatggatggctttgagcaactgaagtttaacttacaacttaaggctgacttgagcgatgattggaggcagcggcagccaatgccaattatcctgagcagtttgttgcaaaaaaagatgcttccagaatcctctctccttattgcattaggaaaactggctatgcaaaaacactattttatgttgcggcatccaaaactcataaagctcttaggattcagtgaatctgaaaagaagtcgtatttctcctacttctttggtgagaagagcaaagccctgaaagtcttcaattttgtgagagataatgggccgctgtttatcttgtgccataatccctttacgtgctggttggtctgtacttgtgtgaaacagaggctagagaggggagaagaccttgaaataaactcccaaaacaccacctatttatatgcatcctttttaacaactgtattcaaagcaggaagtcagagttttccacctaaggtgaacagagcccgactaaaaagcctgtgtgctttggctgcagagggaatttggacatatacatttgtattttcccatggggatctccggaggaatgggttatctgagtctgagggcgtgatgtgggtgggtatgagactcctccaaaggagaggggactgttttgccttcatgcatctgtgtatccaagagttttgtgccgccatgttttatttgctcaaacgacccaaagacgatcctaacccggccattggaagcataacccagcttgtaagagcaagtgtggttcagcctcaaaccctcttgacccaggtggggatattcatgtttggaatttcaacagaagaaatcgtcagcatgctggagacctcctttggttttccactgtcaaaagacctaaagcaggaaataacccaatgccttgaaagtttaagtcaatgtgaagctgatagggaagccatagctttccaggaactattcattggtttgtttgaaactcaggaaaaagaatttgtaaccaaagtgatgaatttctttgaagaagttttcatttatattggtaacatagaacatttggtaatagcttcattctgcctgaagcattgtcaacatttaacgacacttcgcatgtgtgtggagaatatctttccagatgactcaggatgcatctcagattacaatgagaagctcgtctactggcgggagctttgctcaatgttcattaccaacaagaacttccagattttagacatggaaaataccagcctcgatgatccctccctggcgattctttgcaaagcgctggctcagcctgtttgtaaactccgaaaactcatatttacttctgtgtactttggacatgattcagaattatttaaggcagttcttcacaaccctcatctgaaacttctgagcctgtacggcactagcctctcccagtctgacatcagacacctgtgtgagacgctgaaacatccaatgtgcaagatagaagagctgatactgggaaagtgtgacatctccagtgaagtttgtgaagacatcgcctccgtcctggcctgcaacagcaagctgaaacacctctccttggtagaaaatcccttgagggacgaaggaatgacgttgctgtgtgaagccctgaagcactcacactgtgccctggagaggctgatgttgatgtactgctgtctcacctctgtctcctgtgactccatttccgaagtcctcttgtgcagtaagtccctgtccctcctcgatctgggctcaaatgccctggaagataatggagtggcatctctgtgtgcagcgctgaagcacccaggctgcagcatacgggagctgtggttgatgggctgtttccttacttccgattcctgtaaggacattgctgctgttcttatttgcaatgggaaactgaagaccctgaaacttgggcataatgaaataggagacactggtgtcagacagttatgtgcagctttgcagcatcctcactgtaaattagagtgtctcgggctgcaaacgtgtccgatcacccgtgcctgctgcgacgacatcgccgcagcactcatcgcctgcaaaacactgaggagcctgaacctcgactggattgccttggatgctgatgcagtggtggtgctgtgtgaggcattgagccacccggactgtgccctgcagatgctggggctgcacaaatctggctttgatgaagaaactcagaagatcctgatgtctgtggaagaaaaaattccccatctgaccatttcacatggaccttggattgacgaggaatacaagatcaggggtgtgctcctctga

SEQ ID NO: 9111 - RNA, 2976 nt, synthetic construct
  misc_feature 1..2976: note = derived and/or modified sequence opt1 fromNALP9__Homo_sapiens__AAI36584
  source 1..2976: mol_type = other RNA
atggccgagagcttcttctccgacttcggcctgctctggtacctgaaggagctgcggaaggaggagttctggaagttcaaggagctcctgaagcagcccctggagaagttcgagctcaagccgatcccctgggccgagctgaagaaggcgagcaaggaggacgtggccaagctgctcgacaagcactaccccgggaagcaggcctgggaggtcaccctgaacctgttcctccagatcaaccggaaggacctgtggaccaaggcccaggaggagatgcgcaacaagctgaacccctaccggaagcacatgaaggagacgttccagctcatctgggagaaggagacctgcctgcacgtgccggagcacttctacaaggagaccatgaagaacgagtacaaggagctgaacgacgcctacaccgcggccgcccgccggcacacggtggtcctcgagggccccgacgggatcggcaagaccaccctgctgcgcaaggtgatgctcgactgggccgaggggaacctgtggaaggaccggttcaccttcgtgttcttcctgaacgtctgcgagatgaacggcatcgcggagacgtccctcctggagctgctcagccgcgactggcccgagtccagcgagaagatcgaggacatcttctcccagcccgagcggatcctgttcatcatggacggcttcgagcagctgaagttcaacctccagctgaaggccgacctgagcgacgactggcgccagcggcagccgatgcccatcatcctctccagcctgctgcagaagaagatgctccccgagtccagcctgctgatcgccctcgggaagctggccatgcagaagcactacttcatgctgcgccaccccaagctcatcaagctgctgggcttctccgagagcgagaagaagtcctacttcagctacttcttcggggagaagtccaaggccctcaaggtgttcaacttcgtgcgggacaacggcccgctgttcatcctgtgccacaaccccttcacgtgctggctcgtctgcacgtgcgtgaagcagcgcctggagcgcggggaggacctggagatcaacagccagaacaccacctacctgtacgcgtccttcctcaccaccgtgttcaaggccggcagccagagcttcccgcccaaggtcaaccgggcccggctgaagtccctgtgcgccctcgccgcggagggcatctggacctacaccttcgtgttcagccacggggacctgcgccggaacggcctgtccgagagcgagggggtgatgtgggtcggcatgcgcctcctgcagcggcgcggcgactgcttcgccttcatgcacctgtgcatccaggagttctgcgccgccatgttctacctcctgaagcgccccaaggacgaccccaaccccgccatcgggtccatcacccagctggtgcgggcgagcgtggtccagccccagaccctcctgacccaggtgggcatcttcatgttcgggatctccacggaggagatcgtgagcatgctggagacctccttcggcttcccgctcagcaaggacctgaagcaggagatcacccagtgcctggagtccctcagccagtgcgaggccgaccgcgaggccatcgccttccaggagctgttcatcgggctgttcgagacccaggagaaggagttcgtcacgaaggtgatgaacttcttcgaggaggtgttcatctacatcggcaacatcgagcacctcgtcatcgcctccttctgcctgaagcactgccagcacctgaccaccctccggatgtgcgtggagaacatcttccccgacgacagcggctgcatctccgactacaacgagaagctggtctactggcgcgagctgtgcagcatgttcatcaccaacaagaacttccagatcctcgacatggagaacacgtccctggacgaccccagcctggcgatcctctgcaaggccctggcccagcccgtgtgcaagctgcggaagctcatcttcacctccgtgtacttcgggcacgacagcgagctgttcaaggccgtcctgcacaacccgcacctcaagctgctgagcctctacggcacctccctgagccagtccgacatccgccacctgtgcgagaccctcaagcaccccatgtgcaagatcgaggagctgatcctggggaagtgcgacatcagctccgaggtgtgcgaggacatcgcgagcgtgctcgcctgcaactccaagctgaagcacctgagcctcgtcgagaaccccctgcgggacgagggcatgacgctgctctgcgaggccctgaagcactcccactgcgccctggagcgcctcatgctgatgtactgctgcctgaccagcgtgtcctgcgacagcatctccgaggtgctcctgtgcagcaagtccctgagcctcctggacctggggtccaacgccctcgaggacaacggcgtcgcgagcctgtgcgccgccctgaagcaccccggctgcagcatccgggagctctggctgatggggtgcttcctgacctccgacagctgcaaggacatcgccgccgtgctcatctgcaacggcaagctgaagaccctgaagctcgggcacaacgagatcggcgacacgggggtgcgccagctgtgcgcggccctgcagcacccgcactgcaagctcgagtgcctgggcctgcagacctgccccatcacccgggcctgctgcgacgacatcgccgccgcgctcatcgcctgcaagaccctgcgctccctgaacctcgactggatcgccctggacgccgacgcggtcgtggtgctgtgcgaggccctcagccaccccgactgcgccctgcagatgctgggcctccacaagtccgggttcgacgaggagacccagaagatcctgatgagcgtcgaggagaagatcccgcacctgacgatctcccacggcccctggatcgacgaggagtacaagatccgcggggtgctcctgtga

SEQ ID NO: 9112 - RNA, 2976 nt, synthetic construct
  misc_feature 1..2976: note = derived and/or modified sequence opt2 fromNALP9__Homo_sapiens__AAI36584
  source 1..2976: mol_type = other RNA
atggccgagtccttcttctccgacttcggcctcctctggtacctcaaggagctccgcaaggaggagttctggaagttcaaggagctcctcaagcagcccctcgagaagttcgagctcaagcccatcccctgggccgagctcaagaaggcctccaaggaggacgtcgccaagctcctcgacaagcactaccccggcaagcaggcctgggaggtcaccctcaacctcttcctccagatcaaccgcaaggacctctggaccaaggcccaggaggagatgcgcaacaagctcaacccctaccgcaagcacatgaaggagaccttccagctcatctgggagaaggagacctgcctccacgtccccgagcacttctacaaggagaccatgaagaacgagtacaaggagctcaacgacgcctacaccgccgccgcccgccgccacaccgtcgtcctcgagggccccgacggcatcggcaagaccaccctcctccgcaaggtcatgctcgactgggccgagggcaacctctggaaggaccgcttcaccttcgtcttcttcctcaacgtctgcgagatgaacggcatcgccgagacctccctcctcgagctcctctcccgcgactggcccgagtcctccgagaagatcgaggacatcttctcccagcccgagcgcatcctcttcatcatggacggcttcgagcagctcaagttcaacctccagctcaaggccgacctctccgacgactggcgccagcgccagcccatgcccatcatcctctcctccctcctccagaagaagatgctccccgagtcctccctcctcatcgccctcggcaagctcgccatgcagaagcactacttcatgctccgccaccccaagctcatcaagctcctcggcttctccgagtccgagaagaagtcctacttctcctacttcttcggcgagaagtccaaggccctcaaggtcttcaacttcgtccgcgacaacggccccctcttcatcctctgccacaaccccttcacctgctggctcgtctgcacctgcgtcaagcagcgcctcgagcgcggcgaggacctcgagatcaactcccagaacaccacctacctctacgcctccttcctcaccaccgtcttcaaggccggctcccagtccttcccccccaaggtcaaccgcgcccgcctcaagtccctctgcgccctcgccgccgagggcatctggacctacaccttcgtcttctcccacggcgacctccgccgcaacggcctctccgagtccgagggcgtcatgtgggtcggcatgcgcctcctccagcgccgcggcgactgcttcgccttcatgcacctctgcatccaggagttctgcgccgccatgttctacctcctcaagcgccccaaggacgaccccaaccccgccatcggctccatcacccagctcgtccgcgcctccgtcgtccagccccagaccctcctcacccaggtcggcatcttcatgttcggcatctccaccgaggagatcgtctccatgctcgagacctccttcggcttccccctctccaaggacctcaagcaggagatcacccagtgcctcgagtccctctcccagtgcgaggccgaccgcgaggccatcgccttccaggagctcttcatcggcctcttcgagacccaggagaaggagttcgtcaccaaggtcatgaacttcttcgaggaggtcttcatctacatcggcaacatcgagcacctcgtcatcgcctccttctgcctcaagcactgccagcacctcaccaccctccgcatgtgcgtcgagaacatcttccccgacgactccggctgcatctccgactacaacgagaagctcgtctactggcgcgagctctgctccatgttcatcaccaacaagaacttccagatcctcgacatggagaacacctccctcgacgacccctccctcgccatcctctgcaaggccctcgcccagcccgtctgcaagctccgcaagctcatcttcacctccgtctacttcggccacgactccgagctcttcaaggccgtcctccacaacccccacctcaagctcctctccctctacggcacctccctctcccagtccgacatccgccacctctgcgagaccctcaagcaccccatgtgcaagatcgaggagctcatcctcggcaagtgcgacatctcctccgaggtctgcgaggacatcgcctccgtcctcgcctgcaactccaagctcaagcacctctccctcgtcgagaaccccctccgcgacgagggcatgaccctcctctgcgaggccctcaagcactcccactgcgccctcgagcgcctcatgctcatgtactgctgcctcacctccgtctcctgcgactccatctccgaggtcctcctctgctccaagtccctctccctcctcgacctcggctccaacgccctcgaggacaacggcgtcgcctccctctgcgccgccctcaagcaccccggctgctccatccgcgagctctggctcatgggctgcttcctcacctccgactcctgcaaggacatcgccgccgtcctcatctgcaacggcaagctcaagaccctcaagctcggccacaacgagatcggcgacaccggcgtccgccagctctgcgccgccctccagcacccccactgcaagctcgagtgcctcggcctccagacctgccccatcacccgcgcctgctgcgacgacatcgccgccgccctcatcgcctgcaagaccctccgctccctcaacctcgactggatcgccctcgacgccgacgccgtcgtcgtcctctgcgaggccctctcccaccccgactgcgccctccagatgctcggcctccacaagtccggcttcgacgaggagacccagaagatcctcatgtccgtcgaggagaagatcccccacctcaccatctcccacggcccctggatcgacgaggagtacaagatccgcggcgtcctcctctga

SEQ ID NO: 9113 - RNA, 2976 nt, synthetic construct
  misc_feature 1..2976: note = derived and/or modified sequence opt3 fromNALP9__Homo_sapiens__AAI36584
  source 1..2976: mol_type = other RNA
atggccgagagcttcttttccgacttcggcctgctctggtaccttaaggaactgagaaaagaggaattttggaagttcaaagagttgttaaagcagcccctggaaaaatttgagctaaagcctatcccatgggctgagctcaagaaagcatctaaggaagatgtggccaaactgcttgacaagcactatccggggaaacaagcgtgggaggtcaccctgaacttgttcctccagattaataggaaggatctgtggacaaaggctcaggaagagatgcggaacaaactgaatccctaccgcaagcatatgaaagagacttttcagctcatatgggaaaaggagacgtgcttacacgttcctgaacatttctataaagagaccatgaagaacgaatacaaagagctgaatgacgcctatacagcagccgctcgacgtcacactgtggtacttgagggaccagatggtatcggcaagaccacattgctgagaaaggtgatgctagactgggcagaagggaacctctggaaagataggtttaccttcgtctttttcctgaatgtgtgtgagatgaacggaattgccgaaacttcacttctggagttgctcagtcgggactggcccgaaagctccgagaagatcgaggatatttttagccaacctgaacgcatcctgttcataatggacggcttcgagcagttaaaatttaatctgcagctcaaggctgatctttcggacgattggagacagaggcaaccaatgcccatcattctgtcatctttgctacagaaaaagatgctgcctgaaagttccctcctgatcgcccttggtaagctggcgatgcagaaacattacttcatgttgcggcacccaaagctcattaaactgttagggttttctgagagcgaaaagaaatcctatttctcatactttttcggagagaagagtaaggcactgaaagtttttaacttcgtgcgcgacaatggcccgctatttatcctctgccacaaccccttcacatgttggctggtctgcacctgtgtgaagcagcgacttgagagaggcgaagacttggagataaatagccaaaacacgacttacctgtatgcctcttttctcaccacagtattcaaagctgggtcccagtcatttcctccaaaggttaatagggcccggctgaaaagcctttgcgcactggctgccgaaggaatttggacttacaccttcgtgttcagtcatggtgatttgcgtcgcaacggcctctctgagtccgagggggtcatgtgggtgggaatgagactgttacagaggcggggcgactgttttgcgttcatgcacctgtgcatccaagaattttgtgccgcaatgttctatctactcaagcgacccaaggatgaccctaacccagctattggtagcatcacacagctggtgcgcgcctcggtcgttcagccccagacccttttgacgcaagtggggatctttatgttcggaatttctactgaggaaatagtatccatgctggagacatcatttggcttcccgctcagtaaagatctgaagcaggaaatcacccagtgcttagagagcctgtcccagtgtgaggctgacagagaagccattgcatttcaagagcttttcatcggcttgtttgaaactcaggagaaagaatttgtgacaaaggtcatgaatttcttcgaggaggtgttcatatacattgggaacatcgaacatctcgttatcgcctctttttgcctgaaacactgccagcacctaaccacgctgaggatgtgtgtggagaatattttccctgatgacagcggatgcatctcagattataacgaaaagctcgtctactggcgggagctgtgtagtatgtttattaccaataaaaacttccagatacttgacatggaaaatacatccttggatgaccccagcctggctatcttatgcaaggcgctcgcacaaccagtgtgtaagctgcgcaaacttatttttacttctgtatatttcggtcatgactcagagctgtttaaggccgttttgcacaaccctcatctcaaactgctaagtctgtacggcaccagcctctcccagtctgatatcagacacctgtgcgagacacttaagcatcccatgtgtaaaatcgaagagttgattctggggaagtgcgacatatcgagcgaagtgtgtgaggatatcgcttccgtcttagcctgcaattcaaagctcaaacacctgagtcttgtggagaacccactgagggacgaaggaatgactctactctgtgaggcactgaagcactctcattgcgccttggaacgtctgatgttaatgtactgctgtctcaccagcgtctcctgcgattcaattagcgaggtgctgctttgttctaaatccctgagtttgctcgacctgggcagcaatgctctagaagataacggtgttgcctctctgtgcgcagcgcttaagcaccccgggtgttccatccgggagctctggctgatgggctgcttcttgacatcagacagttgtaaagatattgctgccgtgctgatctgcaatggaaagttaaagaccctcaaactgggccataacgagataggggacactggagtacgacagctttgtgcagccctgcagcaccctcactgcaagttggaatgtctcggtctgcaaacgtgcccaatcacaagagcttgctgtgatgacattgccgcagctctaatcgcctgcaaaaccctgaggagccttaatctcgattggattgcgctggacgccgacgctgtcgtggttttgtgtgaggcattatcgcatccggattgcgccctgcagatgctcggcctgcacaagtccgggtttgacgaagagactcagaaaatccttatgtctgtggaagagaagataccccatctgaccattagccacggaccttggatcgatgaggaatataagattcgcggcgtcttgctatga

SEQ ID NO: 9114 - RNA, 2976 nt, synthetic construct
  misc_feature 1..2976: note = derived and/or modified sequence opt4 fromNALP9__Homo_sapiens__AAI36584
  source 1..2976: mol_type = other RNA
atggccgagagcttcttcagcgacttcggcctgctgtggtacctgaaggagctgagaaaggaggagttctggaagttcaaggagctgctgaagcagcccctggagaagttcgagctgaagcccatcccctgggccgagctgaagaaggccagcaaggaggacgtggccaagctgctggacaagcactaccccggcaagcaggcctgggaggtgaccctgaacctgttcctgcagatcaacagaaaggacctgtggaccaaggcccaggaggagatgagaaacaagctgaacccctacagaaagcacatgaaggagaccttccagctgatctgggagaaggagacctgcctgcacgtgcccgagcacttctacaaggagaccatgaagaacgagtacaaggagctgaacgacgcctacaccgccgccgccagaagacacaccgtggtgctggagggccccgacggcatcggcaagaccaccctgctgagaaaggtgatgctggactgggccgagggcaacctgtggaaggacagattcaccttcgtgttcttcctgaacgtgtgcgagatgaacggcatcgccgagaccagcctgctggagctgctgagcagagactggcccgagagcagcgagaagatcgaggacatcttcagccagcccgagagaatcctgttcatcatggacggcttcgagcagctgaagttcaacctgcagctgaaggccgacctgagcgacgactggagacagagacagcccatgcccatcatcctgagcagcctgctgcagaagaagatgctgcccgagagcagcctgctgatcgccctgggcaagctggccatgcagaagcactacttcatgctgagacaccccaagctgatcaagctgctgggcttcagcgagagcgagaagaagagctacttcagctacttcttcggcgagaagagcaaggccctgaaggtgttcaacttcgtgagagacaacggccccctgttcatcctgtgccacaaccccttcacctgctggctggtgtgcacctgcgtgaagcagagactggagagaggcgaggacctggagatcaacagccagaacaccacctacctgtacgccagcttcctgaccaccgtgttcaaggccggcagccagagcttcccccccaaggtgaacagagccagactgaagagcctgtgcgccctggccgccgagggcatctggacctacaccttcgtgttcagccacggcgacctgagaagaaacggcctgagcgagagcgagggcgtgatgtgggtgggcatgagactgctgcagagaagaggcgactgcttcgccttcatgcacctgtgcatccaggagttctgcgccgccatgttctacctgctgaagagacccaaggacgaccccaaccccgccatcggcagcatcacccagctggtgagagccagcgtggtgcagccccagaccctgctgacccaggtgggcatcttcatgttcggcatcagcaccgaggagatcgtgagcatgctggagaccagcttcggcttccccctgagcaaggacctgaagcaggagatcacccagtgcctggagagcctgagccagtgcgaggccgacagagaggccatcgccttccaggagctgttcatcggcctgttcgagacccaggagaaggagttcgtgaccaaggtgatgaacttcttcgaggaggtgttcatctacatcggcaacatcgagcacctggtgatcgccagcttctgcctgaagcactgccagcacctgaccaccctgagaatgtgcgtggagaacatcttccccgacgacagcggctgcatcagcgactacaacgagaagctggtgtactggagagagctgtgcagcatgttcatcaccaacaagaacttccagatcctggacatggagaacaccagcctggacgaccccagcctggccatcctgtgcaaggccctggcccagcccgtgtgcaagctgagaaagctgatcttcaccagcgtgtacttcggccacgacagcgagctgttcaaggccgtgctgcacaacccccacctgaagctgctgagcctgtacggcaccagcctgagccagagcgacatcagacacctgtgcgagaccctgaagcaccccatgtgcaagatcgaggagctgatcctgggcaagtgcgacatcagcagcgaggtgtgcgaggacatcgccagcgtgctggcctgcaacagcaagctgaagcacctgagcctggtggagaaccccctgagagacgagggcatgaccctgctgtgcgaggccctgaagcacagccactgcgccctggagagactgatgctgatgtactgctgcctgaccagcgtgagctgcgacagcatcagcgaggtgctgctgtgcagcaagagcctgagcctgctggacctgggcagcaacgccctggaggacaacggcgtggccagcctgtgcgccgccctgaagcaccccggctgcagcatcagagagctgtggctgatgggctgcttcctgaccagcgacagctgcaaggacatcgccgccgtgctgatctgcaacggcaagctgaagaccctgaagctgggccacaacgagatcggcgacaccggcgtgagacagctgtgcgccgccctgcagcacccccactgcaagctggagtgcctgggcctgcagacctgccccatcaccagagcctgctgcgacgacatcgccgccgccctgatcgcctgcaagaccctgagaagcctgaacctggactggatcgccctggacgccgacgccgtggtggtgctgtgcgaggccctgagccaccccgactgcgccctgcagatgctgggcctgcacaagagcggcttcgacgaggagacccagaagatcctgatgagcgtggaggagaagatcccccacctgaccatcagccacggcccctggatcgacgaggagtacaagatcagaggcgtgctgctgtga

SEQ ID NO: 9115 - RNA, 2976 nt, synthetic construct
  misc_feature 1..2976: note = derived and/or modified sequence opt5 fromNALP9__Homo_sapiens__AAI36584
  source 1..2976: mol_type = other RNA
atggccgagagcttcttttccgacttcggcctgctctggtacctgaaggaacttagaaaagaggaattttggaagttcaaagagctgctcaagcagcccctggaaaaatttgagcttaagcctatcccgtgggctgagctgaagaaagcctctaaggaagatgtggcgaaactcctggacaagcactatcccgggaaacaggcttgggaggtcaccctgaacctcttcctgcaaattaatcggaaggatctttggacaaaggcccaggaagagatgcgcaacaaactgaatccttacagaaagcatatgaaagagacgtttcagctcatctgggaaaaggagacctgcctgcacgttcccgaacatttctataaagagacaatgaagaacgaatacaaagagcttaatgacgcctataccgctgccgctcggcgccacacagtggtgctggagggacctgatggcattgggaagaccacactcctgagaaaggtcatgctggactgggccgaaggaaacctctggaaagatcggtttaccttcgtgtttttcctgaatgtttgtgagatgaacggcatcgcggaaacgagccttctggagctcctgtcccgcgactggcccgaatctagcgagaagattgaggatatcttttcccaacctgaaagaatccttttcattatggacgggttcgagcagctgaaatttaatctccagctgaaggccgatctgtctgacgattggcggcagcgccaaccgatgcccatcattctcagctccctgcttcagaaaaagatgctgcctgaaagctctctcctgatcgctcttggaaagctggccatgcagaaacattacttcatgctcagacaccccaagctgattaaactgctcggcttttccgagagcgaaaagaaatcttatttctcctactttttcggcgaaaagagcaaggctctgaaagtgtttaacttcgtccgggacaatgggcctctttttatcctgtgccacaaccccttcacctgttggctcgtgtgcacatgtgttaagcagcgcctggagagaggagaagacctggagattaattctcaaaacaccacatacctttatgcctcctttctcaccacggtgttcaaagcgggcagccagtcctttccgcctaaggtcaatcgggcccgcctgaaatctctgtgcgctctcgccgctgaagggatctggacatacaccttcgtgttcagccatggagatctgagacggaacggcctttccgagagcgagggggtgatgtgggtcggaatgagactgctccagcgccggggcgactgttttgccttcatgcacctgtgcatccaagaattttgtgccgctatgttctatctgcttaagagacccaaggatgaccctaaccccgcgattggctctatcacacagctcgttcgcgcctccgtggtgcagccccagaccctgctgacccaagtcgggatttttatgttcggaatcagcacagaggaaattgtgtctatgctcgagacgagctttggcttccctctgtccaaagatcttaagcaggaaatcacccagtgcctggagtctctcagccagtgtgaggctgaccgggaagccatcgcctttcaagagctgttcattgggctgtttgaaacacaggagaaagaatttgttaccaaggtgatgaatttcttcgaggaggtcttcatctacattggaaacatcgaacatcttgtgattgcttccttttgcctcaaacactgccagcacctgacaaccctgagaatgtgtgttgagaatatcttcccggatgacagcggctgcatctctgattataacgaaaagctcgtgtactggcgcgagctgtgttccatgtttattacgaataaaaacttccagatccttgacatggaaaatacaagcctggatgacccctctctcgccattctgtgcaaggcgctggctcaacctgtctgtaaacttcggaagctcatctttacctccgtgtatttcgggcatgacagcgagctgtttaaggccgtcctgcacaacccccatctcaaactgctttccctgtacggaacctctctcagccagtccgatattagacacctgtgcgagacactgaagcatcctatgtgtaaaatcgaggagcttattctgggcaagtgcgacatctctagcgaagtgtgtgaggatatcgcctccgttctcgcttgcaatagcaagctgaaacacctctctctggtggagaacccccttcgcgacgaaggcatgaccctgctctgtgaggccctgaagcactcccattgcgctctggaacggcttatgctgatgtactgctgtctcacaagcgtctcttgcgattccattagcgaggtgctgctctgttctaaaagcctgtcccttctggacctcgggagcaatgccctggaagataacggagttgcgtctctgtgcgccgctcttaagcacccgggctgttccatcagagagctgtggctcatggggtgcttcctgacgagcgactcctgtaaagatattgccgctgtgctcatctgcaatggaaagctgaagacccttaaactgggccataacgagattggggacacaggcgtccgccagctgtgtgccgcgctccagcaccctcactgcaagctggaatgtcttggactgcaaacctgccccatcacacgggcctgctgtgatgacatcgctgccgctctcattgcctgcaaaaccctgagatctctcaatctggattggatcgcccttgacgctgacgcggtggtggttctgtgtgaggccctgagccatcctgattgcgctctccagatgctgggccttcacaagtccgggtttgacgaagagacgcagaaaattctgatgtctgtcgaagagaagatcccccatctcaccattagccacggaccttggatcgatgaggaatataagatccggggcgtgctgctctga

SEQ ID NO: 9116 - protein, 690 aa, synthetic construct [sequence omitted]

SEQ ID NO: 9117 - RNA, 2073 nt, synthetic construct
  misc_feature 1..2073: note = NF-kappaB__Homo_sapiens__ABN11234
  source 1..2073: mol_type = other RNA
atggaaaaaattctccaaatggctgaaggtattgatattggggagatgccttcatatgatctggtgctgtccaaaccttccaaaggtcaaaaacgccacctctcaacatgtgatggtcaaaatcctcctaaaaagcaagccggttccaaattccatgcgagacctcgttttgagcctgtacattttgtagctagtagttcaaaagatgaaggacaggaagatccttatggccctcaaacaaaagaggtaaatgaacaaacacattttgccagcatgccaagagacatctaccaagattatactcaagactctttcagtatacaagatgggaattctcagtattgtgattcatcaggattcattctcacaaaagaccagcctgtaacagccaacatgtattttgacagtgggaaccctgccccaagcaccacatcacagcaggcaaactctcagtcaactcctgagccttcaccatcacagacatttcccgagtctgtggtagccgagaagcagtattttattgaaaaattaacggcgacaatctggaagaacctttctaatccagaaatgacttctggatctgataaaattaattatacatatatgttaactcgttgtattcaggcgtgtaagacaaatcctgagtatatatatgctcctttaaaggaaattcctcctgccgacatccccaaaaataaaaaacttctaactgatggctatgcttgtgaagttagatgccaaaatatctacttaactacaggttatgctggcagcaagaatgggtccagggatcgagctacagagctagctgtaaaactcttgcagaaacgtattgaagttagagttgtccggcggaaattcaagcatacatttggagaggacctcgtggtgtgtcagattggcatgtcctcctatgaatttcctccagctctgaagccaccagaagacctggtggtgctgggtaaagatgcttccgggcagccaatttttaatgcttctgccaaacactggaccaattttgtcattacagaaaatgcaaatgatgcaattggtatccttaacaattctgcctcattcaacaagatgtcaattgaatacaaatatgagatgatgccaaatcgcacatggcgttgtcgagtgtttttacaagatcactgcttagctgaaggttatggaaccaagaaaacaagtaaacatgcagctgccgacgaggctttgaaaattcttcaaaaaacacagcccacttatccatctgtcaaaagttcacaatgccatacaggctcttcacccagaggatctggaaagaagaaagatataaaggatcttgtagtttatgagaattcttcaaatcccgtgtgcacgctgaacgacacagctcagtttaaccgaatgacagttgagtatgtctatgaaaggatgacaggcctccgctggaaatgcaaagtgattctagagagtgaagtaattgcagaagcagttggggtgaagaaaactgtcaaatatgaagctgctggggaagctgtgaaaaccctcaaaaagacccagccaactgtcattaacaacttgaagaaaggagctgttgaagatgtgatttcaagaaatgaaattcagggccgctcagcagaggaggcttacaaacagcaaatcaaagaagataatattggaaatcagctgctgagaaagatgggttggactggtggtggtttaggtaaatctggtgagggcatacgggagcctatctcagtgaaagagcagcataagcgggaagggcttggtctggatgtagagagggtgaataaaattgccaagagagatattgaacagatcatcagaaactacgcccgctccgagagccacacagatttgactttctctagagagctgactaatgatgaacggaagcaaatacatcagattgcccagaagtatggtcttaagagtaagtctcatggggtgggccatgataggtacctagtggtaggtagaaaaagacggaaggaagacctactagatcagctcaaacaggaaggccaagtgggccattacgagcttgttatgcctcaagcaaattga

SEQ ID NO: 9118 - RNA, 2073 nt, synthetic construct
  misc_feature 1..2073: note = derived and/or modified sequence opt1 fromNF-kappaB__Homo_sapiens__ABN11234
  source 1..2073: mol_type = other RNA
atggagaagatcctgcagatggccgagggcatcgacatcggggagatgcccagctacgacctcgtgctgtccaagccgagcaagggccagaagcgccacctgtccacgtgcgacgggcagaacccgcccaagaagcaggccggcagcaagttccacgcgcggccccgcttcgagcccgtccacttcgtggcctccagctccaaggacgaggggcaggaggacccctacggcccccagaccaaggaggtgaacgagcagacccacttcgccagcatgccccgggacatctaccaggactacacccaggactccttcagcatccaggacggcaactcccagtactgcgacagctccgggttcatcctcaccaaggaccagccggtcaccgccaacatgtacttcgacagcggcaaccccgccccctccacgaccagccagcaggcgaactcccagagcacccccgagccgtcccccagccagaccttccccgagagcgtggtggccgagaagcagtacttcatcgagaagctgacggccaccatctggaagaacctgtccaaccccgagatgaccagcgggtccgacaagatcaactacacctacatgctcacgcgctgcatccaggcctgcaagaccaacccggagtacatctacgcgcccctgaaggagatcccgcccgccgacatccccaagaacaagaagctgctcaccgacggctacgcctgcgaggtccggtgccagaacatctacctgaccacggggtacgccggcagcaagaacggctcccgcgaccgggccaccgagctggcggtgaagctcctgcagaagcgcatcgaggtgcgggtcgtgcgccggaagttcaagcacaccttcggggaggacctggtggtctgccagatcggcatgagctcctacgagttcccgcccgccctcaagccgcccgaggacctggtggtgctggggaaggacgccagcggccagcccatcttcaacgcctccgccaagcactggaccaacttcgtcatcacggagaacgcgaacgacgccatcggcatcctcaacaacagcgcctccttcaacaagatgagcatcgagtacaagtacgagatgatgcccaaccgcacctggcggtgccgcgtgttcctgcaggaccactgcctggccgaggggtacggcaccaagaagacctccaagcacgccgcggccgacgaggccctcaagatcctgcagaagacgcagcccacctaccccagcgtgaagtccagccagtgccacaccgggtccagcccccggggctccgggaagaagaaggacatcaaggacctggtcgtgtacgagaacagcagcaaccccgtgtgcaccctcaacgacacggcccagttcaaccgcatgaccgtcgagtacgtgtacgagcggatgaccggcctgcgctggaagtgcaaggtgatcctggagtccgaggtcatcgccgaggcggtgggcgtcaagaagaccgtgaagtacgaggccgccggggaggccgtgaagacgctcaagaagacccagccgaccgtcatcaacaacctgaagaagggcgcggtggaggacgtgatcagccggaacgagatccaggggcgctccgccgaggaggcctacaagcagcagatcaaggaggacaacatcggcaaccagctgctccggaagatggggtggaccggcggcgggctgggcaagagcggggagggcatccgcgagcccatctccgtcaaggagcagcacaagcgcgaggggctgggcctcgacgtggagcgggtgaacaagatcgccaagcgcgacatcgagcagatcatccggaactacgcccgcagcgagtcccacacggacctgaccttcagccgggagctgaccaacgacgagcgcaagcagatccaccagatcgcgcagaagtacggcctcaagtccaagagccacggggtcggccacgaccggtacctggtggtggggcgcaagcggcgcaaggaggacctgctcgaccagctgaagcaggagggccaggtcggccactacgagctggtgatgccccaggccaactga

SEQ ID NO: 9119 - RNA, 2073 nt, synthetic construct
  misc_feature 1..2073: note = derived and/or modified sequence opt2 fromNF-kappaB__Homo_sapiens__ABN11234
  source 1..2073: mol_type = other RNA
atggagaagatcctccagatggccgagggcatcgacatcggcgagatgccctcctacgacctcgtcctctccaagccctccaagggccagaagcgccacctctccacctgcgacggccagaacccccccaagaagcaggccggctccaagttccacgcccgcccccgcttcgagcccgtccacttcgtcgcctcctcctccaaggacgagggccaggaggacccctacggcccccagaccaaggaggtcaacgagcagacccacttcgcctccatgccccgcgacatctaccaggactacacccaggactccttctccatccaggacggcaactcccagtactgcgactcctccggcttcatcctcaccaaggaccagcccgtcaccgccaacatgtacttcgactccggcaaccccgccccctccaccacctcccagcaggccaactcccagtccacccccgagccctccccctcccagaccttccccgagtccgtcgtcgccgagaagcagtacttcatcgagaagctcaccgccaccatctggaagaacctctccaaccccgagatgacctccggctccgacaagatcaactacacctacatgctcacccgctgcatccaggcctgcaagaccaaccccgagtacatctacgcccccctcaaggagatcccccccgccgacatccccaagaacaagaagctcctcaccgacggctacgcctgcgaggtccgctgccagaacatctacctcaccaccggctacgccggctccaagaacggctcccgcgaccgcgccaccgagctcgccgtcaagctcctccagaagcgcatcgaggtccgcgtcgtccgccgcaagttcaagcacaccttcggcgaggacctcgtcgtctgccagatcggcatgtcctcctacgagttcccccccgccctcaagccccccgaggacctcgtcgtcctcggcaaggacgcctccggccagcccatcttcaacgcctccgccaagcactggaccaacttcgtcatcaccgagaacgccaacgacgccatcggcatcctcaacaactccgcctccttcaacaagatgtccatcgagtacaagtacgagatgatgcccaaccgcacctggcgctgccgcgtcttcctccaggaccactgcctcgccgagggctacggcaccaagaagacctccaagcacgccgccgccgacgaggccctcaagatcctccagaagacccagcccacctacccctccgtcaagtcctcccagtgccacaccggctcctccccccgcggctccggcaagaagaaggacatcaaggacctcgtcgtctacgagaactcctccaaccccgtctgcaccctcaacgacaccgcccagttcaaccgcatgaccgtcgagtacgtctacgagcgcatgaccggcctccgctggaagtgcaaggtcatcctcgagtccgaggtcatcgccgaggccgtcggcgtcaagaagaccgtcaagtacgaggccgccggcgaggccgtcaagaccctcaagaagacccagcccaccgtcatcaacaacctcaagaagggcgccgtcgaggacgtcatctcccgcaacgagatccagggccgctccgccgaggaggcctacaagcagcagatcaaggaggacaacatcggcaaccagctcctccgcaagatgggctggaccggcggcggcctcggcaagtccggcgagggcatccgcgagcccatctccgtcaaggagcagcacaagcgcgagggcctcggcctcgacgtcgagcgcgtcaacaagatcgccaagcgcgacatcgagcagatcatccgcaactacgcccgctccgagtcccacaccgacctcaccttctcccgcgagctcaccaacgacgagcgcaagcagatccaccagatcgcccagaagtacggcctcaagtccaagtcccacggcgtcggccacgaccgctacctcgtcgtcggccgcaagcgccgcaaggaggacctcctcgaccagctcaagcaggagggccaggtcggccactacgagctcgtcatgccccaggccaactga

SEQ ID NO: 9120 - RNA, 2073 nt, synthetic construct
  misc_feature 1..2073: note = derived and/or modified sequence opt3 fromNF-kappaB__Homo_sapiens__ABN11234
  source 1..2073: mol_type = other RNA
atggagaagatcctgcagatggccgaaggcattgacataggggagatgcccagctacgatctcgtgctttccaaaccttctaagggacagaaaagacacctgtcaacctgcgacggtcaaaacccaccgaagaaacaggctggcagtaagttccatgcaaggccccggtttgaacctgtccacttcgttgccagctcctctaaggatgaggggcaggaagacccatatggaccccaaacaaaagaggtgaatgagcagactcattttgcgtcgatgcctcgcgatatctaccaggactatacgcaggattcattcagcattcaagacggcaacagtcagtactgtgattcctctggttttatcttgaccaaggaccagccagtaacagctaatatgtatttcgatagcgggaaccccgccccttccactacctcacagcaagcaaatagtcagagcacaccagaaccgtctccctcccagacctttcctgagtcagtggtcgccgaaaaacaatacttcattgagaagttaactgctacaatctggaaaaacctgagcaatccagagatgaccagtggatctgacaagataaactatacgtacatgctaactcgatgcatccaggcatgtaagaccaatcccgaatacatttatgcccctctcaaagagatcccacccgctgatattccgaagaacaaaaagctgcttacagacggctacgcctgcgaagtgcgttgtcagaatatctatctgactaccggctacgcggggtccaaaaacggaagcagagacagggcaacagagttggccgttaagctcctgcagaaacggatagaagtgcgcgtcgtgagaaggaagtttaagcacaccttcggtgaggatctggtagtttgccaaattggcatgtcgtcttatgagtttcctcccgctctcaaaccacctgaagacttagtggtcctggggaaggatgcctccggacagcccatcttcaatgcatcagctaaacattggacgaactttgtgattactgagaatgccaacgacgcgatcggcatccttaacaatagtgccagcttcaacaagatgtccattgaatacaaatatgagatgatgccaaatcggacatggcgctgtcgagtgttcttgcaggatcactgcctggcagaaggttacgggaccaagaagacttctaaacacgctgccgctgacgaggccctaaagatactccagaaaacacaacccacctaccctagcgtcaagtcaagtcagtgtcatacgggatccagcccaagaggctctggcaaaaagaaggatatcaaagacctggttgtgtatgagaactcaagtaatccggtatgcacccttaacgatacagcacagtttaataggatgactgtggaatacgtctatgagcggatgaccgggctgcgttggaagtgtaaagtgattttggaaagcgaggttatcgccgaagctgtgggagtcaagaaaacagtgaagtacgaggcggccggtgaggcagtaaagactctcaaaaagacccagcccacagttataaacaatctgaaaaagggcgctgtggaagacgtcatttcccgcaacgagatccaagggagatctgccgaagaggcatataaacagcagatcaaggaggataatattggaaaccagttactgaggaaaatgggctggaccggtgggggcctcggaaagtcgggcgaagggatccgggagcctattagcgtgaaggaacaacacaaacgagagggacttggtctggacgtcgaacgcgtgaataagatagccaaaagagacatcgagcagattatcaggaactacgctcggtccgagtcacatactgatttgacgttcagtcgcgaactaacaaatgacgagagaaagcagatccaccaaattgcccagaaatatggcctgaagtctaagagccacggggttggacatgataggtacctcgtggtaggccgtaaacggcgaaaggaagacctgcttgatcagctgaaacaggagggtcaagtcgggcactacgaattggtgatgccacaggcaaactga

SEQ ID NO: 9121 - RNA, 2073 nt, synthetic construct
  misc_feature 1..2073: note = derived and/or modified sequence opt4 fromNF-kappaB__Homo_sapiens__ABN11234
  source 1..2073: mol_type = other RNA
atggagaagatcctgcagatggccgagggcatcgacatcggcgagatgcccagctacgacctggtgctgagcaagcccagcaagggccagaagagacacctgagcacctgcgacggccagaacccccccaagaagcaggccggcagcaagttccacgccagacccagattcgagcccgtgcacttcgtggccagcagcagcaaggacgagggccaggaggacccctacggcccccagaccaaggaggtgaacgagcagacccacttcgccagcatgcccagagacatctaccaggactacacccaggacagcttcagcatccaggacggcaacagccagtactgcgacagcagcggcttcatcctgaccaaggaccagcccgtgaccgccaacatgtacttcgacagcggcaaccccgcccccagcaccaccagccagcaggccaacagccagagcacccccgagcccagccccagccagaccttccccgagagcgtggtggccgagaagcagtacttcatcgagaagctgaccgccaccatctggaagaacctgagcaaccccgagatgaccagcggcagcgacaagatcaactacacctacatgctgaccagatgcatccaggcctgcaagaccaaccccgagtacatctacgcccccctgaaggagatcccccccgccgacatccccaagaacaagaagctgctgaccgacggctacgcctgcgaggtgagatgccagaacatctacctgaccaccggctacgccggcagcaagaacggcagcagagacagagccaccgagctggccgtgaagctgctgcagaagagaatcgaggtgagagtggtgagaagaaagttcaagcacaccttcggcgaggacctggtggtgtgccagatcggcatgagcagctacgagttcccccccgccctgaagccccccgaggacctggtggtgctgggcaaggacgccagcggccagcccatcttcaacgccagcgccaagcactggaccaacttcgtgatcaccgagaacgccaacgacgccatcggcatcctgaacaacagcgccagcttcaacaagatgagcatcgagtacaagtacgagatgatgcccaacagaacctggagatgcagagtgttcctgcaggaccactgcctggccgagggctacggcaccaagaagaccagcaagcacgccgccgccgacgaggccctgaagatcctgcagaagacccagcccacctaccccagcgtgaagagcagccagtgccacaccggcagcagccccagaggcagcggcaagaagaaggacatcaaggacctggtggtgtacgagaacagcagcaaccccgtgtgcaccctgaacgacaccgcccagttcaacagaatgaccgtggagtacgtgtacgagagaatgaccggcctgagatggaagtgcaaggtgatcctggagagcgaggtgatcgccgaggccgtgggcgtgaagaagaccgtgaagtacgaggccgccggcgaggccgtgaagaccctgaagaagacccagcccaccgtgatcaacaacctgaagaagggcgccgtggaggacgtgatcagcagaaacgagatccagggcagaagcgccgaggaggcctacaagcagcagatcaaggaggacaacatcggcaaccagctgctgagaaagatgggctggaccggcggcggcctgggcaagagcggcgagggcatcagagagcccatcagcgtgaaggagcagcacaagagagagggcctgggcctggacgtggagagagtgaacaagatcgccaagagagacatcgagcagatcatcagaaactacgccagaagcgagagccacaccgacctgaccttcagcagagagctgaccaacgacgagagaaagcagatccaccagatcgcccagaagtacggcctgaagagcaagagccacggcgtgggccacgacagatacctggtggtgggcagaaagagaagaaaggaggacctgctggaccagctgaagcaggagggccaggtgggccactacgagctggtgatgccccaggccaactga

SEQ ID NO: 9122 - RNA, 2073 nt, synthetic construct
  misc_feature 1..2073: note = derived and/or modified sequence opt5 fromNF-kappaB__Homo_sapiens__ABN11234
  source 1..2073: mol_type = other RNA
atggagaagatcctgcagatggccgaaggcattgacatcggggagatgcccagctacgatctcgtgctgtccaaaccttctaagggacagaaaagacaccttagcacatgcgacggccaaaacccgcccaagaaacaggctgggtccaagttccatgcccggcctcgctttgaacccgtccacttcgttgcgtctagctccaaggatgagggacaggaagacccttatggcccccaaaccaaagaggtgaatgagcagacgcattttgcttctatgcctagagatatttaccaggactatacccaggatagcttctccatccaagacgggaacagccagtactgtgattcttccggatttattctgacaaaggaccagccggtgaccgccaatatgtatttcgatagcggcaaccccgccccttctacaacctcccagcaagctaatagccagtctacacccgaaccttcccccagccagacctttccggagtccgtcgtggccgaaaaacaatacttcatcgagaagctcacggctaccatctggaaaaacctgtctaatcctgagatgacaagcggctccgacaagattaactatacctacatgcttacacggtgcatccaggcctgtaagaccaatcccgaatacatttatgcgcctctgaaagagatccctcccgccgatattcccaagaacaaaaagctcctgacggacgggtacgcttgcgaagttcgctgtcagaatatctatctgacaaccggatacgccggcagcaaaaacgggtctagagaccgggctacagagctcgccgtgaagctgcttcagaaacgcattgaagtcagagtggttcggcgcaagtttaagcacaccttcggagaggatctggtggtctgccaaatcggcatgtccagctatgagtttccgcccgcgctcaaacctcccgaagacctggtggtgcttgggaaggatgcctctggacagcctatcttcaatgctagcgccaaacattggaccaactttgtcattacagagaatgctaacgacgccatcggcattctgaacaattccgcctctttcaacaagatgagcatcgaatacaaatatgagatgatgcccaatagaacgtggcggtgtcgcgttttcctccaggatcactgcctggctgaaggctacgggaccaagaagacatccaaacacgcggccgctgacgaggccctgaagattctccagaaaacccaaccgacataccctagcgtgaagtcttcccagtgtcataccggaagctctcccagaggctccgggaaaaagaaggatatcaaagacctggtggtctatgagaacagctccaatcctgtgtgcacgcttaacgatacagcccagtttaatcggatgaccgttgaatacgtgtatgagcgcatgaccggactgagatggaagtgtaaagtcatcctcgaatctgaggtgattgctgaagccgttggcgtgaagaaaacagtcaagtacgaggcggctggggaggccgtgaagaccctgaaaaagacacagcccacggtcatcaacaatcttaaaaagggagccgtggaagacgttattagccggaacgagatccaaggcagatccgctgaagaggcctataaacagcagattaaggaggataatatcggcaaccagctgctccgcaaaatggggtggaccggaggcgggctgggaaagtctggcgaagggatccgggagcctattagcgtgaaggaacaacacaaaagagagggcctgggactcgacgtcgaacgcgtgaataagatcgctaaacgggacattgagcagatcattagaaactacgcccgctccgagagccatacagatctgaccttctctcgggaacttacaaatgacgagagaaagcagatccaccaaattgcgcagaaatatggcctgaagtccaagagccacggggttggacatgatcgctacctcgtggtcggccggaaaagacgcaaggaagacctgcttgatcagctgaaacaggaggggcaagtgggacactacgaactcgtgatgccccaggccaactga

SEQ ID NO: 9123 - protein, 690 aa, synthetic construct
  REGION 1..690: note = NF-kappaB__Homo_sapiens__A3F769
MEKILQMAEGIDIGEMPSYDLVLSKPSKGQKRHLSTCDGQNPPKKQAGSKFHARPRFEPVHFVASSSKDERQEDPYGPQTKEVNEQTHFASMPRDIYQDYTQDSFSIQDGNSQYCDSSGFILTKDQPVTANMYFDSGNPAPSTTSQQANSQSTPEPSPSQTFPESVVAEKQYFIEKLTATIWKNLSNPEMTSGSDKINYTYMLTRCIQACKTNPEYIYAPLKEIPPADIPKNKKLLTDGYACEVRCQNIYLTTGYAGSKNGSRDRATELAVKLLQKRIEVRVVRRKFKHTFGEDLVVCQIGMSSYEFPPALKPPEDLVVLGKDASGQPIFNASAKHWTNFVITENANDAIGILNNSASFNKMSIEYKYEMMPNRTWRCRVFLQDHCLAEGYGTKKTSKHAAADEALKILQKTQPTYPSVKSSQCHTGSSPRGSGKKKDIKDLVVYENSSNPVCTLNDTAQFNRMTVEYVYERMTGLRWKCKVILESEVIAEAVGVKKTVKYEAAGEAVKTLKKTQPTVINNLKKGAVEDVISRNEIQGRSAEEAYKQQIKEDNIGNQLLRKMGWTGGGLGKSGEGIREPISVKEQHKREGLGLDVERVNKIAKRDIEQIIRNYARSESHTDLTFSRELTNDERKQIHQIAQKYGLKSKSHGVGHDRYLVVGRKRRKEDLLDQLKQEGQVGHYELVMPQAN

SEQ ID NO: 9124 - RNA, 2073 nt, synthetic construct
  misc_feature 1..2073: note = NF-kappaB__Homo_sapiens__ABN11235
  source 1..2073: mol_type = other RNA
atggaaaaaattctccaaatggctgaaggtattgatattggggagatgccttcatatgatctggtgctgtccaaaccttccaaaggtcaaaaacgccacctctcaacatgtgatggtcaaaatcctcctaaaaagcaagccggttccaaattccatgcgagacctcgttttgagcctgtacattttgtagctagtagttcaaaagatgaaagacaggaagatccttatggccctcaaacaaaagaggtaaatgaacaaacacattttgccagcatgccaagagacatctaccaagattatactcaagactctttcagtatacaagatgggaattctcagtattgtgattcatcaggattcattctcacaaaagaccagcctgtaacagccaacatgtattttgacagtgggaaccctgccccaagcaccacatcacagcaggcaaactctcagtcaactcctgagccttcaccatcacagacatttcccgagtctgtggtagccgagaagcagtattttattgaaaaattaacggcgacaatctggaagaacctttctaatccagaaatgacttctggatctgataaaattaattatacatatatgttaactcgttgtattcaggcgtgtaagacaaatcctgagtatatatatgctcctttaaaggaaattcctcctgccgacatccccaaaaataaaaaacttctaactgatggctatgcttgtgaagttagatgccaaaatatctacttaactacaggttatgctggcagcaagaatgggtccagggatcgagctacagagctagctgtaaaactcttgcagaaacgtattgaagttagagttgtccggcggaaattcaagcatacatttggagaggacctcgtggtgtgtcagattggcatgtcctcctatgaatttcctccagctctgaagccaccagaagacctggtggtgctgggtaaagatgcttccgggcagccaatttttaatgcttctgccaaacactggaccaattttgtcattacagaaaatgcaaatgatgcaattggtatccttaacaattctgcctcattcaacaagatgtcaattgaatacaaatatgagatgatgccaaatcgcacatggcgttgtcgagtgtttttacaagatcactgcttagctgaaggttatggaaccaagaaaacaagtaaacatgcagctgccgacgaggctttgaaaattcttcaaaaaacacagcccacttatccatctgtcaaaagttcacaatgccatacaggctcttcacccagaggatctggaaagaagaaagatataaaggatcttgtagtttatgagaattcttcaaatcccgtgtgcacgctgaacgacacagctcagtttaaccgaatgacagttgagtatgtctatgaaaggatgacaggcctccgctggaaatgcaaagtgattctagagagtgaagtaattgcagaagcagttggggtgaagaaaactgtcaaatatgaagctgctggggaagctgtgaaaaccctcaaaaagacccagccaactgtcattaacaacttgaagaaaggagctgttgaagatgtgatttcaagaaatgaaattcagggccgctcagcagaggaggcttacaaacagcaaatcaaagaagataatattggaaatcagctgctgagaaagatgggttggactggtggtggtttaggtaaatctggtgagggcatacgggagcctatctcagtgaaagagcagcataagcgggaagggcttggtctggatgtagagagggtgaataaaattgccaagagagatattgaacagatcatcagaaactacgcccgctccgagagccacacagatttgactttctctagagagctgactaatgatgaacggaagcaaatacatcagattgcccagaagtatggtcttaagagtaagtctcatggggtgggccatgataggtacctagtggtaggtagaaaaagacggaaggaagacctactagatcagctcaaacaggaaggccaagtgggccattacgagcttgttatgcctcaagcaaattga

SEQ ID NO: 9125 - RNA, 2073 nt, synthetic construct
  misc_feature 1..2073: note = derived and/or modified sequence opt1 fromNF-kappaB__Homo_sapiens__ABN11235
  source 1..2073: mol_type = other RNA
atggagaagatcctgcagatggccgagggcatcgacatcggggagatgcccagctacgacctcgtgctgtccaagccgagcaagggccagaagcgccacctgtccacgtgcgacgggcagaacccgcccaagaagcaggccggcagcaagttccacgcgcggccccgcttcgagcccgtccacttcgtggcctccagctccaaggacgagcggcaggaggacccctacgggccccagaccaaggaggtgaacgagcagacccacttcgccagcatgccccgcgacatctaccaggactacacccaggactccttcagcatccaggacggcaactcccagtactgcgacagctccggcttcatcctcaccaaggaccagccggtcaccgccaacatgtacttcgacagcgggaaccccgccccctccacgaccagccagcaggcgaactcccagagcacccccgagccgtcccccagccagaccttccccgagagcgtggtggccgagaagcagtacttcatcgagaagctgacggccaccatctggaagaacctgtccaaccccgagatgaccagcggctccgacaagatcaactacacctacatgctcacgcggtgcatccaggcctgcaagaccaacccggagtacatctacgcgcccctgaaggagatcccgcccgccgacatccccaagaacaagaagctgctcaccgacgggtacgcctgcgaggtccgctgccagaacatctacctgaccacgggctacgccgggagcaagaacggctcccgggaccgcgccaccgagctggcggtgaagctcctgcagaagcggatcgaggtgcgcgtcgtgcggcgcaagttcaagcacaccttcggcgaggacctggtggtctgccagatcgggatgagctcctacgagttcccgcccgccctcaagccgcccgaggacctggtggtgctgggcaaggacgccagcgggcagcccatcttcaacgcctccgccaagcactggaccaacttcgtcatcacggagaacgcgaacgacgccatcggcatcctcaacaacagcgcctccttcaacaagatgagcatcgagtacaagtacgagatgatgcccaaccggacctggcgctgccgggtgttcctgcaggaccactgcctggccgagggctacgggaccaagaagacctccaagcacgccgcggccgacgaggccctcaagatcctgcagaagacgcagcccacctaccccagcgtgaagtccagccagtgccacaccggctccagcccccgcgggtccggcaagaagaaggacatcaaggacctggtcgtgtacgagaacagcagcaaccccgtgtgcaccctcaacgacacggcccagttcaaccggatgaccgtcgagtacgtgtacgagcgcatgaccgggctgcggtggaagtgcaaggtgatcctggagtccgaggtcatcgccgaggcggtgggcgtcaagaagaccgtgaagtacgaggccgccggcgaggccgtgaagacgctcaagaagacccagccgaccgtcatcaacaacctgaagaagggggcggtggaggacgtgatcagccgcaacgagatccagggccggtccgccgaggaggcctacaagcagcagatcaaggaggacaacatcgggaaccagctgctccgcaagatgggctggaccgggggcggcctgggcaagagcggggaggggatccgcgagcccatctccgtcaaggagcagcacaagcgggagggcctggggctcgacgtggagcgcgtgaacaagatcgccaagcgggacatcgagcagatcatccgcaactacgcccggagcgagtcccacacggacctgaccttcagccgcgagctgaccaacgacgagcggaagcagatccaccagatcgcgcagaagtacggcctcaagtccaagagccacggcgtcgggcacgaccgctacctggtggtgggccggaagcgccggaaggaggacctgctcgaccagctgaagcaggaggggcaggtcggccactacgagctggtgatgccccaggccaactga

SEQ ID NO: 9126 - RNA, 2073 nt, synthetic construct
  misc_feature 1..2073: note = derived and/or modified sequence opt2 fromNF-kappaB__Homo_sapiens__ABN11235
  source 1..2073: mol_type = other RNA
atggagaagatcctccagatggccgagggcatcgacatcggcgagatgccctcctacgacctcgtcctctccaagccctccaagggccagaagcgccacctctccacctgcgacggccagaacccccccaagaagcaggccggctccaagttccacgcccgcccccgcttcgagcccgtccacttcgtcgcctcctcctccaaggacgagcgccaggaggacccctacggcccccagaccaaggaggtcaacgagcagacccacttcgcctccatgccccgcgacatctaccaggactacacccaggactccttctccatccaggacggcaactcccagtactgcgactcctccggcttcatcctcaccaaggaccagcccgtcaccgccaacatgtacttcgactccggcaaccccgccccctccaccacctcccagcaggccaactcccagtccacccccgagccctccccctcccagaccttccccgagtccgtcgtcgccgagaagcagtacttcatcgagaagctcaccgccaccatctggaagaacctctccaaccccgagatgacctccggctccgacaagatcaactacacctacatgctcacccgctgcatccaggcctgcaagaccaaccccgagtacatctacgcccccctcaaggagatcccccccgccgacatccccaagaacaagaagctcctcaccgacggctacgcctgcgaggtccgctgccagaacatctacctcaccaccggctacgccggctccaagaacggctcccgcgaccgcgccaccgagctcgccgtcaagctcctccagaagcgcatcgaggtccgcgtcgtccgccgcaagttcaagcacaccttcggcgaggacctcgtcgtctgccagatcggcatgtcctcctacgagttcccccccgccctcaagccccccgaggacctcgtcgtcctcggcaaggacgcctccggccagcccatcttcaacgcctccgccaagcactggaccaacttcgtcatcaccgagaacgccaacgacgccatcggcatcctcaacaactccgcctccttcaacaagatgtccatcgagtacaagtacgagatgatgcccaaccgcacctggcgctgccgcgtcttcctccaggaccactgcctcgccgagggctacggcaccaagaagacctccaagcacgccgccgccgacgaggccctcaagatcctccagaagacccagcccacctacccctccgtcaagtcctcccagtgccacaccggctcctccccccgcggctccggcaagaagaaggacatcaaggacctcgtcgtctacgagaactcctccaaccccgtctgcaccctcaacgacaccgcccagttcaaccgcatgaccgtcgagtacgtctacgagcgcatgaccggcctccgctggaagtgcaaggtcatcctcgagtccgaggtcatcgccgaggccgtcggcgtcaagaagaccgtcaagtacgaggccgccggcgaggccgtcaagaccctcaagaagacccagcccaccgtcatcaacaacctcaagaagggcgccgtcgaggacgtcatctcccgcaacgagatccagggccgctccgccgaggaggcctacaagcagcagatcaaggaggacaacatcggcaaccagctcctccgcaagatgggctggaccggcggcggcctcggcaagtccggcgagggcatccgcgagcccatctccgtcaaggagcagcacaagcgcgagggcctcggcctcgacgtcgagcgcgtcaacaagatcgccaagcgcgacatcgagcagatcatccgcaactacgcccgctccgagtcccacaccgacctcaccttctcccgcgagctcaccaacgacgagcgcaagcagatccaccagatcgcccagaagtacggcctcaagtccaagtcccacggcgtcggccacgaccgctacctcgtcgtcggccgcaagcgccgcaaggaggacctcctcgaccagctcaagcaggagggccaggtcggccactacgagctcgtcatgccccaggccaactga

SEQ ID NO: 9127 - RNA, 2073 nt, synthetic construct
  misc_feature 1..2073: note = derived and/or modified sequence opt3 fromNF-kappaB__Homo_sapiens__ABN11235
  source 1..2073: mol_type = other RNA
atggagaagatcctgcagatggccgaaggcattgacataggggagatgcccagctacgatctcgtgctttccaaaccttctaagggacagaaaagacacctgtcaacctgcgacggtcaaaacccaccgaagaaacaggctggcagtaagttccatgcaaggccccggtttgaacctgtccacttcgttgccagctcctctaaggatgagcgccaggaagacccatatgggccccaaacaaaagaggtgaatgagcagactcattttgcgtcgatgcctcgagatatctaccaggactatacgcaggattcattcagcattcaagacggaaacagtcagtactgtgattcctctggctttatcttgaccaaggaccagccagtaacagctaatatgtatttcgatagcggtaaccccgccccttccactacctcacagcaagcaaatagtcagagcacaccagaaccgtctccctcccagacctttcctgagtcagtggtcgccgaaaaacaatacttcattgagaagttaactgctacaatctggaaaaacctgagcaatccagagatgaccagtgggtctgacaagataaactatacgtacatgctaactcgttgcatccaggcatgtaagaccaatcccgaatacatttatgcccctctcaaagagatcccacccgctgatattccgaagaacaaaaagctgcttacagacggatacgcctgcgaagtgagatgtcagaatatctatctgactaccggctacgcgggctccaaaaacgggagcagggaccgggcaacagagttggccgttaagctcctgcagaaacgcatagaagtgagagtcgtgaggcggaagtttaagcacaccttcggagaggatctggtagtttgccaaattggtatgtcgtcttatgagtttcctcccgctctcaaaccacctgaagacttagtggtcctgggcaaggatgcctccgggcagcccatcttcaatgcatcagctaaacattggacgaactttgtgattactgagaatgccaacgacgcgatcggaatccttaacaatagtgccagcttcaacaagatgtccattgaatacaaatatgagatgatgccaaatcgcacatggcgatgtagagtgttcttgcaggatcactgcctggcagaaggctacggtaccaagaagacttctaaacacgctgccgctgacgaggccctaaagatactccagaaaacacaacccacctaccctagcgtcaagtcaagtcagtgtcatacggggtccagcccaaggggatctggcaaaaagaaggatatcaaagacctggttgtgtatgagaactcaagtaatccggtatgcacccttaacgatacagcacagtttaatcggatgactgtggaatacgtctatgagcgtatgaccggcctgcgctggaagtgtaaagtgattttggaaagcgaggttatcgccgaagctgtgggggtcaagaaaacagtgaagtacgaggcggcaggagaggccgtaaagactctcaaaaagacccagcccacagttataaacaatctgaaaaagggtgctgtggaagacgtcatttccagaaacgagatccaaggcaggtctgccgaagaggcatataaacagcagatcaaggaggataatattgggaaccagttactgcggaaaatgggatggaccggcggtgggctcggcaagtcgggagaaggcatccgagagcctattagcgtgaaggaacaacacaaacgcgaggggcttggactggacgtcgaaagagtgaataagatagccaaaagggacatcgagcagattatccggaactacgctcgctccgagtcacatactgatttgacgttcagtagagaactaacaaatgacgagaggaagcagatccaccaaattgcccagaaatatggtctgaagtctaagagccacggcgttgggcatgatcgttacctcgtggtaggacggaaacgaagaaaggaagacctgcttgatcagctgaaacaggagggccaagtcggtcactacgaattggtgatgccacaggcaaactga

SEQ ID NO: 9128 - RNA, 2073 nt, synthetic construct
  misc_feature 1..2073: note = derived and/or modified sequence opt4 fromNF-kappaB__Homo_sapiens__ABN11235
  source 1..2073: mol_type = other RNA
atggagaagatcctgcagatggccgagggcatcgacatcggcgagatgcccagctacgacctggtgctgagcaagcccagcaagggccagaagagacacctgagcacctgcgacggccagaacccccccaagaagcaggccggcagcaagttccacgccagacccagattcgagcccgtgcacttcgtggccagcagcagcaaggacgagagacaggaggacccctacggcccccagaccaaggaggtgaacgagcagacccacttcgccagcatgcccagagacatctaccaggactacacccaggacagcttcagcatccaggacggcaacagccagtactgcgacagcagcggcttcatcctgaccaaggaccagcccgtgaccgccaacatgtacttcgacagcggcaaccccgcccccagcaccaccagccagcaggccaacagccagagcacccccgagcccagccccagccagaccttccccgagagcgtggtggccgagaagcagtacttcatcgagaagctgaccgccaccatctggaagaacctgagcaaccccgagatgaccagcggcagcgacaagatcaactacacctacatgctgaccagatgcatccaggcctgcaagaccaaccccgagtacatctacgcccccctgaaggagatcccccccgccgacatccccaagaacaagaagctgctgaccgacggctacgcctgcgaggtgagatgccagaacatctacctgaccaccggctacgccggcagcaagaacggcagcagagacagagccaccgagctggccgtgaagctgctgcagaagagaatcgaggtgagagtggtgagaagaaagttcaagcacaccttcggcgaggacctggtggtgtgccagatcggcatgagcagctacgagttcccccccgccctgaagccccccgaggacctggtggtgctgggcaaggacgccagcggccagcccatcttcaacgccagcgccaagcactggaccaacttcgtgatcaccgagaacgccaacgacgccatcggcatcctgaacaacagcgccagcttcaacaagatgagcatcgagtacaagtacgagatgatgcccaacagaacctggagatgcagagtgttcctgcaggaccactgcctggccgagggctacggcaccaagaagaccagcaagcacgccgccgccgacgaggccctgaagatcctgcagaagacccagcccacctaccccagcgtgaagagcagccagtgccacaccggcagcagccccagaggcagcggcaagaagaaggacatcaaggacctggtggtgtacgagaacagcagcaaccccgtgtgcaccctgaacgacaccgcccagttcaacagaatgaccgtggagtacgtgtacgagagaatgaccggcctgagatggaagtgcaaggtgatcctggagagcgaggtgatcgccgaggccgtgggcgtgaagaagaccgtgaagtacgaggccgccggcgaggccgtgaagaccctgaagaagacccagcccaccgtgatcaacaacctgaagaagggcgccgtggaggacgtgatcagcagaaacgagatccagggcagaagcgccgaggaggcctacaagcagcagatcaaggaggacaacatcggcaaccagctgctgagaaagatgggctggaccggcggcggcctgggcaagagcggcgagggcatcagagagcccatcagcgtgaaggagcagcacaagagagagggcctgggcctggacgtggagagagtgaacaagatcgccaagagagacatcgagcagatcatcagaaactacgccagaagcgagagccacaccgacctgaccttcagcagagagctgaccaacgacgagagaaagcagatccaccagatcgcccagaagtacggcctgaagagcaagagccacggcgtgggccacgacagatacctggtggtgggcagaaagagaagaaaggaggacctgctggaccagctgaagcaggagggccaggtgggccactacgagctggtgatgccccaggccaactga

SEQ ID NO: 9129 - RNA, 2073 nt, synthetic construct
  misc_feature 1..2073: note = derived and/or modified sequence opt5 fromNF-kappaB__Homo_sapiens__ABN11235
  source 1..2073: mol_type = other RNA
atggagaagatcctgcagatggccgaaggcattgacatcggggagatgcccagctacgatctcgtgctgtccaaaccttctaagggacagaaaagacaccttagcacatgcgacggccaaaacccgcccaagaaacaggctgggtccaagttccatgcccggcctcgctttgaacccgtccacttcgttgcgtctagctccaaggatgagagacaggaagacccttatggaccccaaaccaaagaggtgaatgagcagacgcattttgcttctatgcctcgggatatttaccaggactatacccaggatagcttctccatccaagacggcaacagccagtactgtgattcttccgggtttattctgacaaaggaccagccggtgaccgccaatatgtatttcgatagcggaaaccccgccccttctacaacctcccagcaagctaatagccagtctacacccgaaccttcccccagccagacctttccggagtccgtcgtggccgaaaaacaatacttcatcgagaagctcacggctaccatctggaaaaacctgtctaatcctgagatgacaagcggctccgacaagattaactatacctacatgcttacacgctgcatccaggcctgtaagaccaatcccgaatacatttatgcgcctctgaaagagatccctcccgccgatattcccaagaacaaaaagctcctgacggacggctacgcttgcgaagttagatgtcagaatatctatctgacaaccgggtacgccggaagcaaaaacggctctcgggaccgcgctacagagctcgccgtgaagctgcttcagaaaagaattgaagtccgggtggttcgcagaaagtttaagcacaccttcggggaggatctggtggtctgccaaatcggaatgtccagctatgagtttccgcccgcgctcaaacctcccgaagacctggtggtgcttggcaaggatgcctctgggcagcctatcttcaatgctagcgccaaacattggaccaactttgtcattacagagaatgctaacgacgccatcggcattctgaacaattccgcctctttcaacaagatgagcatcgaatacaaatatgagatgatgcccaatcggacgtggcgctgtagagttttcctccaggatcactgcctggctgaaggatacggcaccaagaagacatccaaacacgcggccgctgacgaggccctgaagattctccagaaaacccaaccgacataccctagcgtgaagtcttcccagtgtcataccgggagctctccccggggatccggcaaaaagaaggatatcaaagacctggtggtctatgagaacagctccaatcctgtgtgcacgcttaacgatacagcccagtttaatcgcatgaccgttgaatacgtgtatgagagaatgaccgggctgcggtggaagtgtaaagtcatcctcgaatctgaggtgattgctgaagccgttggagtgaagaaaacagtcaagtacgaggcggctggcgaggccgtgaagaccctgaaaaagacacagcccacggtcatcaacaatcttaaaaagggggccgtggaagacgttattagcagaaacgagatccaaggacgctccgctgaagaggcctataaacagcagattaaggaggataatatcggcaaccagctgctccggaaaatgggctggaccgggggaggcctggggaagtctggagaaggcatcagagagcctattagcgtgaaggaacaacacaaacgcgaggggctgggcctcgacgtcgaacgggtgaataagatcgctaaaagagacattgagcagatcattcgcaactacgcccggtccgagagccatacagatctgaccttctctagagaacttacaaatgacgagcgcaagcagatccaccaaattgcgcagaaatatggactgaagtccaagagccacggcgttgggcatgatcggtacctcgtggtcggaagaaaacgccggaaggaagacctgcttgatcagctgaaacaggagggccaagtggggcactacgaactcgtgatgccccaggccaactga

SEQ ID NO: 9130 - protein, 975 aa, synthetic construct
  REGION 1..975: note = NLRP14__Homo_sapiens__Q86UT6
MRWGHHLPRASWGSGFRRALQRPDDRIPFLIHWSWPLQGERPFGPPRAFIRHHGSSVDSAPPPGRHGRLFPSASATEAIQRHRRNLAEWFSRLPREERQFGPTFALDTVHVDPVIRESTPDELLRPPAELALEHQPPQAGLPPLALSQLFNPDACGRRVQTVVLYGTVGTGKSTLVRKMVLDWCYGRLPAFELLIPFSCEDLSSLGPAPASLCQLVAQRYTPLKEVLPLMAAAGSHLLFVLHGLEHLNLDFRLAGTGLCSDPEEPQEPAAIIVNLLRKYMLPQASILVTTRPSAIGRIPSKYVGRYGEICGFSDTNLQKLYFQLRLNQPYCGYAVGGSGVSATPAQRDHLVQMLSRNLEGHHQIAAACFLPSYCWLVCATLHFLHAPTPAGQTLTSIYTSFLRLNFSGETLDSTDPSNLSLMAYAARTMGKLAYEGVSSRKTYFSEEDVCGCLEAGIRTEEEFQLLHIFRRDALRFFLAPCVEPGRAGTFVFTVPAMQEYLAALYIVLGLRKTTLQKVGKEVAELVGRVGEDVSLVLGIMAKLLPLRALPLLFNLIKVVPRVFGRMVGKSREAVAQAMVLEMFREEDYYNDDVLDQMGASILGVEGPRRHPDEPPEDEVFELFPMFMGGLLSAHNRAVLAQLGCPIKNLDALENAQAIKKKLGKLGRQVLPPSELLDHLFFHYEFQNQRFSAEVLSSLRQLNLAGVRMTPVKCTVVAAVLGSGRHALDEVNLASCQLDPAGLRTLLPVFLRARKLGLQLNSLGPEACKDLRDLLLHDQCQITTLRLSNNPLTAAGVAVLMEGLAGNTSVTHLSLLHTGLGDEGLELLAAQLDRNRQLQELNVAYNGAGDTAALALARAAREHPSLELLHLYFNELSSEGRQVLRDLGGAAEGGARVVVSLTEGTAVSEYWSVILSEVQRNLNSWDRARVQRHLELLLRDLEDSRGATLNPWRKAQLLRVEGEVRALLEQLGSSGS

SEQ ID NO: 9131 - RNA, 2928 nt, synthetic construct
  misc_feature 1..2928: note = NLRP14__Homo_sapiens__AAI10891
  source 1..2928: mol_type = other RNA
atgaggtggggccaccatttgcccagggcctcttggggctctggttttagaagagcactccagcgaccagatgatcgtatccccttcctgatccactggagttggccccttcaaggggagcgtccctttgggccccctagggcctttatacgccaccacggaagctcggtagatagcgctcccccacccgggaggcatggacggctgttccccagcgcctctgcaactgaagctatacagcggcaccgccggaacctggctgagtggttcagccggctgcccagggaggagcgccagtttggcccaacctttgccctagacacggtccacgttgaccctgtgatccgcgagagtacccctgatgagctacttcgcccacccgcggagctggccctggagcatcagccaccccaggccgggctccccccactggccttgtctcagctctttaacccggatgcctgtgggcgccgggtgcagacagtggtgctgtatgggacagtgggcacaggcaagagcacgctggtgcgcaagatggttctggactggtgttatgggcggctgccggccttcgagctgctcatccccttctcctgtgaggacctgtcatccctgggccctgccccagcctccctgtgccaacttgtggcccagcgctacacgcccctgaaggaggttctgcccctgatggctgctgctgggtcccacctcctctttgtgctccatggcttagagcatctcaacctcgacttccggctggcaggcacgggactttgtagtgacccggaggaaccgcaggaaccagctgctatcatcgtcaacctgctgcgcaaatacatgctgcctcaggccagcattctggtgaccactcggccctctgccattggccgtatccccagcaagtacgtgggccgctatggtgagatctgcggtttctctgataccaacctgcagaagctctacttccagctccgcctcaaccagccgtactgcgggtatgccgttggcggttcaggtgtctctgccacaccagctcagcgtgaccacctggtgcagatgctctcccggaacctggaggggcaccaccagatagccgctgcctgcttcctgccgtcctattgctggctcgtttgtgccaccttgcacttcctgcatgcccccacgcctgctgggcagacccttacaagcatctataccagcttcctgcgcctcaacttcagcggggaaaccctggacagcactgacccctccaatttgtccctgatggcctatgcagcccgaaccatgggcaagttggcctatgagggggtgtcctcccgcaagacctacttctctgaagaggatgtctgtggctgcctggaggctggcatcaggacggaggaggagtttcagctgctgcacatcttccgtcgggatgccctgaggtttttcctggccccatgtgtggagccagggcgtgcaggcaccttcgtgttcaccgtgcccgccatgcaggaatacctggctgccctctacattgtgctgggtttgcgcaagacgaccctgcaaaaggtgggcaaggaagtggctgagctcgtgggccgtgttggggaggacgtcagcctggtactgggcatcatggccaagctgctgcctctgcgggctctgcctctgctcttcaacctgatcaaggtggttccacgagtgtttgggcgcatggtgggtaaaagccgggaggcggtggctcaggccatggtgctggagatgtttcgagaggaggactactacaacgatgatgttctggaccagatgggcgccagtatcctgggcgtggagggcccccggcgccacccagatgagccccctgaggatgaagtcttcgagctcttccccatgttcatgggggggcttctctctgcccacaaccgagctgtgctagctcagcttggctgccccatcaagaacctggatgccctggagaatgcccaggccatcaagaagaagctgggcaagctgggccggcaggtgctgcccccatcagagctccttgaccacctcttcttccactatgagttccagaaccagcgcttctccgctgaggtgctcagctccctgcgtcagctcaacctggcaggtgtgcgcatgacaccagtcaagtgcacagtggtggcagctgtgctgggcagcggaaggcatgccctggatgaggtgaacttggcctcctgccagctagatcctgctgggctgcgcacactcctgcctgtcttcctgcgtgcccggaagctgggcttgcaactcaacagcctgggccctgaggcctgcaaggacctccgagacctgttgctgcatgaccagtgccaaattaccacactgcggctgtccaacaacccgctgacggcggcaggtgttgccgtgctaatggaggggctggcaggaaacacctcagtgacgcacctgtccctgctgcacacgggccttggggacgaaggcctggagctgctggctgcccagctggaccgcaaccggcagctgcaggagctgaacgtggcgtacaacggtgctggtgacacagcggccctggccctggccagagctgcccgggagcacccttccctggaactgctacacctctacttcaatgagctgagctcagagggccgccaggtcttgcgagacttggggggtgctgctgaaggtggtgcccgggtggtggtgtcactgacagaggggacggcggtgtcagaatactggtcagtgatcctcagtgaagtccagcggaacctcaatagctgggatcgggcccgggttcagcgacaccttgagctcctactgcgggatctggaagatagccggggtgccacccttaatccttggcgcaaggcccagctgctgcgagtggagggcgaggtcagggccctcctggagcagctgggaagctctggaagctga

SEQ ID NO: 9132 - RNA, 2928 nt, synthetic construct
  misc_feature 1..2928: note = derived and/or modified sequence opt1 fromNLRP14__Homo_sapiens__AAI10891
  source 1..2928: mol_type = other RNA
atgcgctggggccaccacctcccccgggccagctgggggtccggcttccgccgggccctgcagcgcccggacgaccggatccccttcctgatccactggagctggcccctgcagggggagcgccccttcggcccgccccgggcgttcatccgccaccacgggtccagcgtggactccgccccgccgcccggccggcacggccgcctcttccccagcgcctccgccaccgaggccatccagcggcaccgccggaacctggcggagtggttcagccgcctgccccgggaggagcgccagttcgggcccaccttcgccctcgacacggtccacgtggaccccgtgatccgggagtccacccccgacgagctgctgcgcccgcccgccgagctcgccctggagcaccagccgccccaggcgggcctgccgcccctcgccctgagccagctgttcaaccccgacgcctgcgggcggcgcgtccagaccgtggtgctctacggcaccgtcgggacgggcaagtccaccctggtgcggaagatggtgctggactggtgctacggccgcctccccgccttcgagctgctgatccccttcagctgcgaggacctctccagcctggggcccgccccggcgtccctgtgccagctcgtcgcccagcgctacacgcccctgaaggaggtgctgcccctcatggccgccgccggcagccacctcctgttcgtgctgcacgggctggagcacctgaacctcgacttccggctggcgggcaccggcctgtgctccgaccccgaggagccgcaggagcccgccgccatcatcgtcaacctcctgcgcaagtacatgctgccccaggccagcatcctcgtgaccacccggccgtccgccatcgggcgcatccccagcaagtacgtgggccggtacggggagatctgcggcttcagcgacaccaacctgcagaagctgtacttccagctccgcctgaaccagccctactgcgggtacgcggtcggcggctccggggtgagcgccacccccgcccagcgggaccacctggtgcagatgctctcccgcaacctggagggccaccaccagatcgccgccgcgtgcttcctgcccagctactgctggctcgtctgcgccacgctgcacttcctgcacgcccccacccccgccgggcagaccctgacctccatctacacgagcttcctccggctgaacttctccggcgagaccctggacagcaccgacccctccaacctcagcctgatggcgtacgccgcccgcaccatggggaagctggcctacgagggcgtgtccagccggaagacgtacttctccgaggaggacgtgtgcggctgcctcgaggccgggatccgcaccgaggaggagttccagctgctgcacatcttccggcgcgacgcgctccggttcttcctggccccgtgcgtcgagcccggccgcgccgggaccttcgtgttcaccgtgcccgccatgcaggagtacctggccgcgctctacatcgtcctgggcctgcggaagacgaccctccagaaggtggggaaggaggtcgccgagctggtgggccgcgtgggcgaggacgtcagcctggtgctcgggatcatggccaagctgctgcccctccgggccctgccgctcctgttcaacctgatcaaggtggtcccccgcgtgttcggccgcatggtggggaagtcccgggaggccgtcgcgcaggccatggtgctggagatgttccgcgaggaggactactacaacgacgacgtgctcgaccagatgggcgccagcatcctgggcgtcgaggggccccggcgccaccccgacgagccgcccgaggacgaggtgttcgagctgttccccatgttcatgggcgggctcctgtccgcccacaaccgggcggtgctggcccagctcggctgccccatcaagaacctggacgccctggagaacgcccaggccatcaagaagaagctcgggaagctgggccgccaggtcctgccgcccagcgagctcctggaccacctgttcttccactacgagttccagaaccagcggttctccgcggaggtgctcagcagcctgcgccagctgaacctcgccggcgtgcggatgacccccgtcaagtgcaccgtggtggccgccgtcctggggtccggccgccacgccctggacgaggtgaacctcgcgagctgccagctggaccccgccgggctgcggacgctcctgccggtgttcctgcgcgcccggaagctcggcctgcagctgaactccctcgggcccgaggcctgcaaggacctgcgcgacctgctcctgcacgaccagtgccagatcaccaccctgcggctcagcaacaaccccctgaccgccgcgggcgtcgccgtgctgatggagggcctcgccgggaacacgtccgtgacccacctgagcctgctccacaccggcctgggggacgagggcctggagctcctggccgcgcagctggaccgcaaccggcagctccaggagctgaacgtcgcctacaacggggccggcgacaccgccgccctggcgctcgcccgcgccgcccgggagcacccgtccctggagctgctccacctgtacttcaacgagctgagctccgagggccgccaggtgctccgggacctcgggggcgccgcggagggcggggcccgcgtggtcgtgagcctgacggaggggaccgccgtgtccgagtactggagcgtcatcctgtccgaggtgcagcgcaacctgaacagctgggaccgggcccgcgtgcagcggcacctggagctcctgctgcgcgacctcgaggactcccggggcgccaccctgaacccctggcgcaaggcgcagctgctgcgggtcgagggcgaggtgcgcgccctcctggagcagctggggagctccggcagctga

SEQ ID NO: 9133 - RNA, 2928 nt, synthetic construct
  misc_feature 1..2928: note = derived and/or modified sequence opt2 fromNLRP14__Homo_sapiens__AAI10891
  source 1..2928: mol_type = other RNA
atgcgctggggccaccacctcccccgcgcctcctggggctccggcttccgccgcgccctccagcgccccgacgaccgcatccccttcctcatccactggtcctggcccctccagggcgagcgccccttcggccccccccgcgccttcatccgccaccacggctcctccgtcgactccgcccccccccccggccgccacggccgcctcttcccctccgcctccgccaccgaggccatccagcgccaccgccgcaacctcgccgagtggttctcccgcctcccccgcgaggagcgccagttcggccccaccttcgccctcgacaccgtccacgtcgaccccgtcatccgcgagtccacccccgacgagctcctccgcccccccgccgagctcgccctcgagcaccagcccccccaggccggcctcccccccctcgccctctcccagctcttcaaccccgacgcctgcggccgccgcgtccagaccgtcgtcctctacggcaccgtcggcaccggcaagtccaccctcgtccgcaagatggtcctcgactggtgctacggccgcctccccgccttcgagctcctcatccccttctcctgcgaggacctctcctccctcggccccgcccccgcctccctctgccagctcgtcgcccagcgctacacccccctcaaggaggtcctccccctcatggccgccgccggctcccacctcctcttcgtcctccacggcctcgagcacctcaacctcgacttccgcctcgccggcaccggcctctgctccgaccccgaggagccccaggagcccgccgccatcatcgtcaacctcctccgcaagtacatgctcccccaggcctccatcctcgtcaccacccgcccctccgccatcggccgcatcccctccaagtacgtcggccgctacggcgagatctgcggcttctccgacaccaacctccagaagctctacttccagctccgcctcaaccagccctactgcggctacgccgtcggcggctccggcgtctccgccacccccgcccagcgcgaccacctcgtccagatgctctcccgcaacctcgagggccaccaccagatcgccgccgcctgcttcctcccctcctactgctggctcgtctgcgccaccctccacttcctccacgcccccacccccgccggccagaccctcacctccatctacacctccttcctccgcctcaacttctccggcgagaccctcgactccaccgacccctccaacctctccctcatggcctacgccgcccgcaccatgggcaagctcgcctacgagggcgtctcctcccgcaagacctacttctccgaggaggacgtctgcggctgcctcgaggccggcatccgcaccgaggaggagttccagctcctccacatcttccgccgcgacgccctccgcttcttcctcgccccctgcgtcgagcccggccgcgccggcaccttcgtcttcaccgtccccgccatgcaggagtacctcgccgccctctacatcgtcctcggcctccgcaagaccaccctccagaaggtcggcaaggaggtcgccgagctcgtcggccgcgtcggcgaggacgtctccctcgtcctcggcatcatggccaagctcctccccctccgcgccctccccctcctcttcaacctcatcaaggtcgtcccccgcgtcttcggccgcatggtcggcaagtcccgcgaggccgtcgcccaggccatggtcctcgagatgttccgcgaggaggactactacaacgacgacgtcctcgaccagatgggcgcctccatcctcggcgtcgagggcccccgccgccaccccgacgagccccccgaggacgaggtcttcgagctcttccccatgttcatgggcggcctcctctccgcccacaaccgcgccgtcctcgcccagctcggctgccccatcaagaacctcgacgccctcgagaacgcccaggccatcaagaagaagctcggcaagctcggccgccaggtcctccccccctccgagctcctcgaccacctcttcttccactacgagttccagaaccagcgcttctccgccgaggtcctctcctccctccgccagctcaacctcgccggcgtccgcatgacccccgtcaagtgcaccgtcgtcgccgccgtcctcggctccggccgccacgccctcgacgaggtcaacctcgcctcctgccagctcgaccccgccggcctccgcaccctcctccccgtcttcctccgcgcccgcaagctcggcctccagctcaactccctcggccccgaggcctgcaaggacctccgcgacctcctcctccacgaccagtgccagatcaccaccctccgcctctccaacaaccccctcaccgccgccggcgtcgccgtcctcatggagggcctcgccggcaacacctccgtcacccacctctccctcctccacaccggcctcggcgacgagggcctcgagctcctcgccgcccagctcgaccgcaaccgccagctccaggagctcaacgtcgcctacaacggcgccggcgacaccgccgccctcgccctcgcccgcgccgcccgcgagcacccctccctcgagctcctccacctctacttcaacgagctctcctccgagggccgccaggtcctccgcgacctcggcggcgccgccgagggcggcgcccgcgtcgtcgtctccctcaccgagggcaccgccgtctccgagtactggtccgtcatcctctccgaggtccagcgcaacctcaactcctgggaccgcgcccgcgtccagcgccacctcgagctcctcctccgcgacctcgaggactcccgcggcgccaccctcaacccctggcgcaaggcccagctcctccgcgtcgagggcgaggtccgcgccctcctcgagcagctcggctcctccggctcctga

SEQ ID NO: 9134 - RNA, 2928 nt, synthetic construct
  misc_feature 1..2928: note = derived and/or modified sequence opt3 fromNLRP14__Homo_sapiens__AAI10891
  source 1..2928: mol_type = other RNA
atgagatggggccaccatctgcccagggccagctgggggtccggattccggcgcgctctccagcgacctgacgatcgtatcccatttcttattcactggtcttggccgctgcaaggtgagagacccttcggccctccaagggcatttatacggcatcacgggtcaagtgtggacagcgcaccccctccaggacgccatggcagattgttcccctccgcgtctgctaccgaagccatccagaggcaccggcgcaacttagcagagtggttttcgcgactgcctagagaagagaggcagttcggtccaacatttgccctagatactgtccacgttgacccggtgattcgggaatcaacgcccgatgagctcctgcgtcctccagctgagcttgcactggaacatcagccccctcaagccgggttgccacccctcgctctgagccagctgttcaatccggacgcctgcggacgcagagtacagaccgtggtcctctacggcacagtgggcactgggaagagtaccttagttaggaaaatggtgctggattggtgttatggacggcttcctgcgtttgagttgctgatccccttctcctgcgaagacctatctagcctcggtccagcccctgcctccctgtgtcagcttgtcgctcaacgatacacacccctgaaggaggtgttgccactcatggccgcagctggctcacacctgttatttgtactgcatgggctcgagcaccttaacctggatttccgcttggccggaaccggcctatgcagtgaccccgaggaacctcaggaaccagcggccattatcgttaatctgctcagaaaatatatgctgccgcaggcaagcatacttgtgactacaaggccctctgctatcggtcggattccttccaagtacgtcgggcgctatggagagatctgtggcttttcagataccaacctgcagaaattgtacttccaactcagactgaatcagccatattgcggctacgccgtcgggggaagcggtgtgagtgctacgcccgcccagagggaccacttagtgcaaatgctgtctcgtaacctagaaggccatcaccagattgcagccgcttgtttcctcccttcctactgctggctggtttgtgcgactcttcactttttgcatgcaccaacccccgccgggcagacactgactagcatctatacctcgttcctccggctgaatttttctggagagacacttgattccaccgacccgtcaaacctgagtttgatggcttacgccgcacgaacgatgggcaagctcgcctatgagggtgtgagctccagaaagacttacttctctgaagaggacgtatgcgggtgtctggaagctggcataaggacagaggaagagtttcagttactgcatattttccgccgggatgccctaagatttttcctcgcaccttgcgtggagccaggaagggcgggcacctttgtcttcactgtgcccgctatgcaagaatatctggccgcactttacatcgttttggggctgcgcaaaacaaccctccagaaggtgggaaaagaggtcgccgaactggtgggtcgagtaggcgaggacgttagcttagtgctggggattatggctaaacttttgcctctccgggccctgcccctactgtttaatctcatcaaagtcgtgccacgtgtcttcggaagaatggtgggcaagtcaagggaagcagttgctcaggccatggtgctggagatgtttcgcgaggaagattattacaacgacgatgtacttgaccagatgggtgcgagtatcttgggggtcgagggccctcggagacaccccgatgaaccaccggaggacgaggtgttcgaactgttccctatgtttatgggaggcttactctccgcccacaatagggctgttctggcacaacttgggtgccccattaagaacctggatgccttggagaatgctcaggccataaagaagaaactcggaaagctgggtcgacaggtgctaccacccagcgaactgctcgaccatctgttctttcactacgagttccagaaccaacgcttttctgcagaagtcctttcaagtttgcggcagctgaatttagcgggcgtgagaatgacgcctgtaaaatgtaccgtggttgccgctgtcctcgggagcggaaggcatgccctggatgaggtgaaccttgcatcctgccagctggacccagctggcctacgtacactcctgcccgtgttcttgcgcgcccggaagctgggtttacagctcaactctctggggcctgaggcatgtaaagaccttagagatctgttgctccacgaccaatgccagatcactaccctgaggctatcgaataacccgctgacagccgctggcgtcgcggttcttatggaaggactcgccggcaatactagcgtgacccacctgtccttgctgcatacagggttaggagatgagggcctcgaactgcttgcagctcagctggaccgaaaccggcaattgcaggagctcaatgtggcctataacggtgccggggataccgctgcactggccctagcgcgcgctgccagagaacacccatcactggagcttctccatctgtactttaatgagttgagttctgaaggaaggcaggtattacgggacctgggcggtgcagccgagggcggggctcgagtcgtggttagcctcactgaaggaacggcagtgtccgagtattggtcagtcattctgagcgaagtgcagagaaaccttaattcttgggatcgcgccagggttcaacgtcacctggagttgctactgcgggacctcgaggattccagaggcgcgacactgaacccctggaggaaggctcagcttttacgcgtggaaggggaggtacgagccctgctcgaacagttgggaagtagcggctcttga

SEQ ID NO: 9135 - RNA, 2928 nt, synthetic construct
  misc_feature 1..2928: note = derived and/or modified sequence opt4 fromNLRP14__Homo_sapiens__AAI10891
  source 1..2928: mol_type = other RNA
atgagatggggccaccacctgcccagagccagctggggcagcggcttcagaagagccctgcagagacccgacgacagaatccccttcctgatccactggagctggcccctgcagggcgagagacccttcggcccccccagagccttcatcagacaccacggcagcagcgtggacagcgcccccccccccggcagacacggcagactgttccccagcgccagcgccaccgaggccatccagagacacagaagaaacctggccgagtggttcagcagactgcccagagaggagagacagttcggccccaccttcgccctggacaccgtgcacgtggaccccgtgatcagagagagcacccccgacgagctgctgagaccccccgccgagctggccctggagcaccagcccccccaggccggcctgccccccctggccctgagccagctgttcaaccccgacgcctgcggcagaagagtgcagaccgtggtgctgtacggcaccgtgggcaccggcaagagcaccctggtgagaaagatggtgctggactggtgctacggcagactgcccgccttcgagctgctgatccccttcagctgcgaggacctgagcagcctgggccccgcccccgccagcctgtgccagctggtggcccagagatacacccccctgaaggaggtgctgcccctgatggccgccgccggcagccacctgctgttcgtgctgcacggcctggagcacctgaacctggacttcagactggccggcaccggcctgtgcagcgaccccgaggagccccaggagcccgccgccatcatcgtgaacctgctgagaaagtacatgctgccccaggccagcatcctggtgaccaccagacccagcgccatcggcagaatccccagcaagtacgtgggcagatacggcgagatctgcggcttcagcgacaccaacctgcagaagctgtacttccagctgagactgaaccagccctactgcggctacgccgtgggcggcagcggcgtgagcgccacccccgcccagagagaccacctggtgcagatgctgagcagaaacctggagggccaccaccagatcgccgccgcctgcttcctgcccagctactgctggctggtgtgcgccaccctgcacttcctgcacgcccccacccccgccggccagaccctgaccagcatctacaccagcttcctgagactgaacttcagcggcgagaccctggacagcaccgaccccagcaacctgagcctgatggcctacgccgccagaaccatgggcaagctggcctacgagggcgtgagcagcagaaagacctacttcagcgaggaggacgtgtgcggctgcctggaggccggcatcagaaccgaggaggagttccagctgctgcacatcttcagaagagacgccctgagattcttcctggccccctgcgtggagcccggcagagccggcaccttcgtgttcaccgtgcccgccatgcaggagtacctggccgccctgtacatcgtgctgggcctgagaaagaccaccctgcagaaggtgggcaaggaggtggccgagctggtgggcagagtgggcgaggacgtgagcctggtgctgggcatcatggccaagctgctgcccctgagagccctgcccctgctgttcaacctgatcaaggtggtgcccagagtgttcggcagaatggtgggcaagagcagagaggccgtggcccaggccatggtgctggagatgttcagagaggaggactactacaacgacgacgtgctggaccagatgggcgccagcatcctgggcgtggagggccccagaagacaccccgacgagccccccgaggacgaggtgttcgagctgttccccatgttcatgggcggcctgctgagcgcccacaacagagccgtgctggcccagctgggctgccccatcaagaacctggacgccctggagaacgcccaggccatcaagaagaagctgggcaagctgggcagacaggtgctgccccccagcgagctgctggaccacctgttcttccactacgagttccagaaccagagattcagcgccgaggtgctgagcagcctgagacagctgaacctggccggcgtgagaatgacccccgtgaagtgcaccgtggtggccgccgtgctgggcagcggcagacacgccctggacgaggtgaacctggccagctgccagctggaccccgccggcctgagaaccctgctgcccgtgttcctgagagccagaaagctgggcctgcagctgaacagcctgggccccgaggcctgcaaggacctgagagacctgctgctgcacgaccagtgccagatcaccaccctgagactgagcaacaaccccctgaccgccgccggcgtggccgtgctgatggagggcctggccggcaacaccagcgtgacccacctgagcctgctgcacaccggcctgggcgacgagggcctggagctgctggccgcccagctggacagaaacagacagctgcaggagctgaacgtggcctacaacggcgccggcgacaccgccgccctggccctggccagagccgccagagagcaccccagcctggagctgctgcacctgtacttcaacgagctgagcagcgagggcagacaggtgctgagagacctgggcggcgccgccgagggcggcgccagagtggtggtgagcctgaccgagggcaccgccgtgagcgagtactggagcgtgatcctgagcgaggtgcagagaaacctgaacagctgggacagagccagagtgcagagacacctggagctgctgctgagagacctggaggacagcagaggcgccaccctgaacccctggagaaaggcccagctgctgagagtggagggcgaggtgagagccctgctggagcagctgggcagcagcggcagctga

SEQ ID NO: 9136 - RNA, 2928 nt, synthetic construct
  misc_feature 1..2928: note = derived and/or modified sequence opt5 fromNLRP14__Homo_sapiens__AAI10891
  source 1..2928: mol_type = other RNA
atgagatggggccaccatctgccccgggccagctgggggtccggattccgcagagctctccagcggcctgacgatcgcatcccgtttctgattcactggtcttggccccttcaaggcgagagacctttcgggccccctcgggcctttatccgccatcacggaagctccgtggactctgcgccccctccgggcagacatgggcggctgttccccagcgcttccgccaccgaagccattcagcgccacagacggaacctcgctgagtggttttctcgcctgcctagagaagaacggcagttcggacccacatttgcccttgatacggtccacgttgaccctgtgatccgcgaaagcacccccgatgagctgctcagaccgcctgctgagctggccctggaacatcagccccctcaagcgggcctccctcccctggccctttcccagctgttcaatcccgacgcttgcggccggagagtgcagacagtcgtgctctacgggaccgttggaacaggcaagagcaccctggtgcgcaaaatggtccttgattggtgttatgggcggctgccggcctttgagctcctgattcccttctcttgcgaagacctgtccagcctcggacctgctcccgcctctctgtgtcagcttgtggcgcaaagatacacacctctgaaggaggttctccccctgatggccgctgccggctcccaccttctgtttgtgctccatgggctggagcacctgaacctcgatttccgcctggctggaaccggcctttgcagcgacccggaggagcctcaggaacccgccgccatcatcgtcaatctgctccggaaatatatgctgcctcaggcttctattcttgtgacgaccagaccctccgcgatcggccgcattcctagcaagtacgtggggcggtatggagagatctgtggcttttccgatacaaacctgcagaaactctacttccaactgagactgaatcagccctattgcgggtacgccgtcggaggctctggggttagcgctaccccggcccagcgcgaccacctcgtgcaaatgctgtcccggaaccttgaaggacatcaccagattgccgctgcctgtttcctgcctagctactgctggctcgtgtgtgcgacactgcattttctgcacgctcccacccccgccggccagacgcttacatctatctatacctccttcctcagactgaattttagcggcgagacactggattctaccgaccctagcaacctctccctgatggcctacgctgcccgcaccatggggaagctggcttatgagggagtctctagccggaagacatacttctccgaagaggacgtgtgcggctgtctggaagccgggattagaacggaggaagagtttcagctcctgcatatcttccggcgcgatgcgctgagatttttccttgccccgtgcgttgagcccggacgggctggcacctttgtgttcacagtccctgccatgcaagaatatctcgctgccctgtacatcgtgctggggctcagaaaaaccacactgcagaaggttggcaaagaggtggcggaacttgtcggacgcgtgggcgaggacgtcagcctggtgctcgggattatggccaagctgctgccccttcgggctctccctctgctgtttaatctcatcaaagttgtgcccagagtcttcggacgcatggtgggcaagtctagagaagccgttgctcaggccatggtgctggagatgtttcgggaggaagattattacaacgacgatgtccttgaccagatgggggcctccattctgggagtggagggccctcgcagacaccccgatgaaccgcctgaggacgaggtgttcgaactcttccccatgtttatgggcgggctgctgagcgctcacaatcgggcggttcttgcccaactcggatgccctatcaagaacctggatgctctggagaatgcccaggccattaaaaagaaactcggcaagctggggcgccaggtccttcccccgtctgaactgctcgaccatctgttctttcactacgagttccagaaccaaagattttccgctgaagtgctgagctcccttcggcagctgaatctcgccggagtgcgcatgacccctgtcaaatgtacggtggttgcggctgtgctgggctctgggagacatgccctcgatgaggtcaacctggccagctgccagcttgaccccgctggactgcggacactcctgcctgtgttcctgcgcgccagaaaacttggcctgcagctcaactccctggggcccgaggcgtgtaaggacctccgggatctgcttctgcacgaccaatgccagatcaccaccctcagactgtctaataaccccctgacagctgccggcgttgccgtgcttatggaaggactggctggcaataccagcgtcacacacctctccctgctccatacggggctgggagatgagggccttgaactgctggccgctcagctcgaccgcaaccggcaactgcaggagcttaatgtggcctataacggggcgggagataccgccgctctggccctcgctagagccgcccgcgaacaccctagcctggagctcctgcatctttactttaatgagctgtcttccgaaggccggcaggttctgagagacctcgggggcgctgcggagggaggcgcccgcgtggtcgtgagcctgacagaagggaccgctgtgtctgagtattggtccgtcatccttagcgaagttcagcggaaccttaattcttgggatagagcccgcgtgcaacggcacctcgagctgctcctgagagaccttgaggatagccggggagccacactgaacccgtggcgcaaggctcagctgctcagagtggaaggcgaggtccgggccctgcttgaacagctggggtccagcggatcttga

SEQ ID NO: 9137 - protein, 1093 aa, synthetic construct
  REGION 1..1093: note = NLRP14__Homo_sapiens__Q86W24
MADSSSSSFFPDFGLLLYLEELNKEELNTFKLFLKETMEPEHGLTPWNEVKKARREDLANLMKKYYPGEKAWSVSLKIFGKMNLKDLCERAKEEINWSAQTIGPDDAKAGETQEDQEAVLGDGTEYRNRIKEKFCITWDKKSLAGKPEDFHHGIAEKDRKLLEHLFDVDVKTGAQPQIVVLQGAAGVGKTTLVRKAMLDWAEGSLYQQRFKYVFYLNGREINQLKERSFAQLISKDWPSTEGPIEEIMYQPSSLLFIIDSFDELNFAFEEPEFALCEDWTQEHPVSFLMSSLLRKVMLPEASLLVTTRLTTSKRLKQLLKNHHYVELLGMSEDAREEYIYQFFEDKRWAMKVFSSLKSNEMLFSMCQVPLVCWAACTCLKQQMEKGGDVTLTCQTTTALFTCYISSLFTPVDGGSPSLPNQAQLRRLCQVAAKGIWTMTYVFYRENLRRLGLTQSDVSSFMDSNIIQKDAEYENCYVFTHLHVQEFFAAMFYMLKGSWEAGNPSCQPFEDLKSLLQSTSYKDPHLTQMKCFLFGLLNEDRVKQLERTFNCKMSLKIKSKLLQCMEVLGNSDYSPSQLGFLELFHCLYETQDKAFISQAMRCFPKVAINICEKIHLLVSSFCLKHCRCLRTIRLSVTVVFEKKILKTSLPTNTWDGDRITHCWQDLCSVLHTNEHLRELDLYHSNLDKSAMNILHHELRHPNCKLQKLLLKFITFPDGCQDISTSLIHNKNLMHLDLKGSDIGDNGVKSLCEALKHPECKLQTLRLESCNLTVFCCLNISNALIRSQSLIFLNLSTNNLLDDGVQLLCEALRHPKCYLERLSLESCGLTEAGCEYLSLALISNKRLTHLCLADNVLGDGGVKLMSDALQHAQCTLKSLVLRRCHFTSLSSEYLSTSLLHNKSLTHLDLGSNWLQDNGVKLLCDVFRHPSCNLQDLELMGCVLTNACCLDLASVILNNPNLRSLDLGNNDLQDDGVKILCDALRYPNCNIQRLGLEYCGLTSLCCQDLSSALICNKRLIKMNLTQNTLGYEGIVKLYKVLKSPKCKLQVLGLCKEAFDEEAQKLLEAVGVSNPHLIIKPDCNYHNEEDVSWWWCF

SEQ ID NO: 9138 - RNA, 3282 nt, synthetic construct
  misc_feature 1..3282: note = NLRP14__Homo_sapiens__AAO18165
  source 1..3282: mol_type = other RNA
atggcagattcatcatcatcttctttctttcctgattttgggctgctattgtatttggaggagctaaacaaagaggaattaaatacattcaagttattcctaaaggagaccatggaacctgagcatggcctgacaccctggaatgaagtgaagaaggccaggcgggaggacctggccaatttgatgaagaaatattatccaggagagaaagcctggagtgtgtctctcaaaatctttggcaagatgaacctgaaggatctgtgtgagagagcgaaagaagagatcaactggtcggcccagactataggaccagatgatgccaaggctggagagacacaagaagatcaggaggcagtgctgggtgatggaacagaatacagaaatagaataaaggaaaaattttgcatcacttgggacaagaagtctttggctggaaagcctgaagatttccatcatggaattgcagagaaagatagaaaactgttggaacacttgttcgatgtggatgtcaaaaccggtgcacagccacagatcgtggtgcttcagggagctgctggagttgggaaaacaaccttggtgagaaaggcaatgttagattgggcagagggcagtctctaccagcagaggtttaagtatgttttttatctcaatgggagagaaattaaccagctgaaagagagaagctttgctcaattgatatcaaaggactggcccagcacagaaggccccattgaagaaatcatgtaccagccaagtagcctcttgtttattattgacagtttcgatgaactgaactttgcctttgaagaacctgagtttgcactgtgcgaagactggacccaagaacacccagtgtccttcctcatgagtagtttgctgaggaaagtgatgctccctgaggcatccttattggtgacaacaagactcacaacttctaagagactaaagcagttgttgaagaatcaccattatgtagagctactaggaatgtctgaggatgcaagagaggagtatatttaccagttttttgaagataagaggtgggccatgaaagtattcagttcactaaaaagcaatgagatgctgtttagcatgtgccaagtccccctagtgtgctgggccgcttgtacttgtctgaagcagcaaatggagaagggtggtgatgtcacattgacctgccaaacaaccacagctctgtttacctgctatatttctagcttgttcacaccagtagatggaggctctcctagtctacccaaccaagcccagctgagaagactgtgccaagtcgctgccaaaggaatatggactatgacttacgtgttttacagagaaaatctcagaaggcttgggttaactcaatctgatgtctctagttttatggacagcaatattattcagaaggacgcagagtatgaaaactgctatgtgttcacccaccttcatgttcaggagttttttgcagctatgttctatatgttgaaaggcagttgggaagctgggaacccttcctgccagccttttgaagatttgaagtcattacttcaaagcacaagttataaagacccccatttgacacagatgaagtgctttttgtttggccttttgaatgaagatcgagtaaaacaactggagaggacttttaactgtaaaatgtcactgaagataaaatcaaagttacttcagtgtatggaagtattaggaaacagtgactattctccatcacagctgggatttctggagttgtttcactgtctgtatgagactcaagataaagcgtttataagccaggcaatgagatgtttcccaaaggttgccattaatatttgtgagaaaatacatttgcttgtatcttctttctgccttaagcactgccggtgtttgcggaccatcaggctgtctgtaactgtggtatttgagaagaagatattaaaaacaagcctcccaactaacacttgggatggtgatcgcattactcactgttggcaagatctctgttctgtgcttcatacaaatgaacacttgagagaattggacctgtaccatagcaaccttgataaatcagcaatgaatatcctgcatcatgaactaaggcacccaaactgtaaactacaaaagctactgttgaaatttatcactttccctgatggttgtcaggatatctctacttctttgattcataacaagaatctgatgcatcttgacctaaaagggagtgatataggggataatggagtaaagtcattgtgtgaggccttgaaacacccagagtgtaaactacagactctcaggctggaatcttgcaacctaactgtattttgttgtctaaatatatctaatgctctcatcagaagccagagcctgatatttctgaatctgtcaaccaataatctgttggatgatggagtgcagcttttgtgtgaggccttaagacatccaaagtgttatctagagagactgtccttagaaagctgtggtctcacagaggctggctgtgagtatctttctttggctctcatcagcaataaaagactgacacatttgtgcttggcagacaatgtcttgggtgatggtggagtaaagcttatgagtgatgccctgcaacatgcacaatgtactctgaagagccttgtgctgaggcgttgccatttcacttcacttagcagtgaatatctgtcaacttctcttctacacaacaagagcctgacgcatctggatctaggatcaaactggctacaagacaatggagtgaagcttctgtgtgatgtctttcggcatccaagctgtaatcttcaggacttggaattgatgggctgtgttctcactaatgcatgttgtctggatctggcttctgttattttgaataacccaaacctgaggagcctggaccttgggaacaacgatttgcaggatgatggagtgaaaattctgtgtgatgctttgagatatccaaactgtaacattcagaggctcgggttggaatactgtggtttgacatctctctgctgtcaagatctctcctctgctcttatctgcaacaaaagactgataaaaatgaatctgacacagaataccttaggatatgaaggaattgtgaagttatataaagtcttgaagtctcctaagtgtaaactacaagttctagggttgtgcaaagaggcatttgatgaggaagcccagaagctgctggaagctgtgggagttagcaatccacacttaatcattaagccagattgtaactatcataatgaagaagatgtgtcttggtggtggtgtttctga

SEQ ID NO: 9139 - RNA, 3282 nt, synthetic construct
  misc_feature 1..3282: note = derived and/or modified sequence opt1 fromNLRP14__Homo_sapiens__AAO18165
  source 1..3282: mol_type = other RNA
atggccgacagctccagctccagcttcttccccgacttcggcctgctcctgtacctggaggagctcaacaaggaggagctgaacaccttcaagctgttcctcaaggagaccatggagccggagcacgggctgacgccctggaacgaggtgaagaaggcccgccgggaggacctggcgaacctcatgaagaagtactaccccggcgagaaggcctggtccgtcagcctgaagatcttcgggaagatgaacctgaaggacctctgcgagcgcgccaaggaggagatcaactggtccgcccagaccatcggccccgacgacgccaaggcgggggagacccaggaggaccaggaggccgtgctgggcgacggcaccgagtaccggaaccgcatcaaggagaagttctgcatcacgtgggacaagaagtccctggccgggaagccggaggacttccaccacggcatcgccgagaaggaccggaagctcctggagcacctgttcgacgtggacgtcaagaccggggcgcagccccagatcgtggtgctccagggcgccgccggggtcggcaagaccaccctggtgcgcaaggccatgctggactgggccgagggcagcctctaccagcagcggttcaagtacgtgttctacctgaacgggcgcgagatcaaccagctgaaggagcggagcttcgcgcagctcatctccaaggactggcccagcacggagggccccatcgaggagatcatgtaccagccgtccagcctgctgttcatcatcgactccttcgacgagctcaacttcgccttcgaggagcccgagttcgccctgtgcgaggactggacccaggagcaccccgtcagcttcctgatgtccagcctcctgcgcaaggtgatgctgcccgaggcctccctcctggtgaccacccggctgacgaccagcaagcgcctcaagcagctgctgaagaaccaccactacgtcgagctcctggggatgagcgaggacgcccgggaggagtacatctaccagttcttcgaggacaagcgctgggcgatgaaggtgttctccagcctgaagtccaacgagatgctgttcagcatgtgccaggtgccgctggtctgctgggccgcctgcacgtgcctgaagcagcagatggagaagggcggcgacgtgaccctgacctgccagaccaccaccgccctcttcacgtgctacatctccagcctgttcacccccgtggacgggggctcccccagcctccccaaccaggcccagctgcggcgcctgtgccaggtcgcggccaaggggatctggaccatgacctacgtgttctaccgggagaacctgcgccggctcggcctgacgcagtccgacgtgagctccttcatggacagcaacatcatccagaaggacgccgagtacgagaactgctacgtcttcacccacctccacgtgcaggagttcttcgccgccatgttctacatgctcaaggggtcctgggaggcgggcaacccgagctgccagcccttcgaggacctgaagtccctgctccagagcacctcctacaaggacccccacctgacccagatgaagtgcttcctgttcggcctcctgaacgaggaccgcgtgaagcagctggagcggacgttcaactgcaagatgagcctcaagatcaagtccaagctgctgcagtgcatggaggtcctcgggaacagcgactacagcccctcccagctgggcttcctggagctgttccactgcctgtacgagacccaggacaaggccttcatcagccaggccatgcgctgcttcccgaaggtggccatcaacatctgcgagaagatccacctcctcgtctccagcttctgcctgaagcactgccgctgcctgcggaccatccgcctctccgtgaccgtggtcttcgagaagaagatcctgaagacgagcctgcccaccaacacctgggacggggaccggatcacccactgctggcaggacctctgctccgtgctgcacacgaacgagcacctccgcgagctggacctgtaccacagcaacctggacaagtccgcgatgaacatcctccaccacgagctgcggcaccccaactgcaagctgcagaagctcctgctgaagttcatcaccttccccgacggctgccaggacatcagcacctccctcatccacaacaagaacctgatgcacctggacctcaaggggagcgacatcggcgacaacggcgtgaagtccctgtgcgaggccctgaagcacccggagtgcaagctccagaccctgcgcctggagagctgcaacctcaccgtcttctgctgcctgaacatctccaacgccctgatccggagccagtccctcatcttcctgaacctgagcacgaacaacctcctggacgacggggtgcagctgctctgcgaggccctgcgccaccccaagtgctacctggagcggctcagcctggagtcctgcggcctgaccgaggccgggtgcgagtacctcagcctggcgctgatctccaacaagcgcctcacccacctgtgcctggccgacaacgtgctcggcgacgggggcgtcaagctgatgagcgacgccctgcagcacgcccagtgcaccctcaagtccctggtgctgcggcgctgccacttcacgagcctctccagcgagtacctgtccaccagcctgctccacaacaagtccctgacccacctggacctcggcagcaactggctgcaggacaacggggtgaagctgctctgcgacgtcttccggcacccctcctgcaacctgcaggacctggagctcatgggctgcgtgctgaccaacgcctgctgcctggacctcgcgagcgtgatcctgaacaaccccaacctgcgctccctcgacctggggaacaacgacctgcaggacgacggcgtcaagatcctgtgcgacgccctccggtacccgaactgcaacatccagcgcctgggcctggagtactgcgggctcacgagcctgtgctgccaggacctgtccagcgccctcatctgcaacaagcggctgatcaagatgaacctgacccagaacaccctcggctacgaggggatcgtgaagctgtacaaggtgctgaagtcccccaagtgcaagctccaggtcctgggcctgtgcaaggaggccttcgacgaggaggcccagaagctcctggaggcggtgggggtgagcaacccccacctgatcatcaagccggactgcaactaccacaacgaggaggacgtcagctggtggtggtgcttctga

SEQ ID NO: 9140 - RNA, 3282 nt, synthetic construct
  misc_feature 1..3282: note = derived and/or modified sequence opt2 fromNLRP14__Homo_sapiens__AAO18165
  source 1..3282: mol_type = other RNA
atggccgactcctcctcctcctccttcttccccgacttcggcctcctcctctacctcgaggagctcaacaaggaggagctcaacaccttcaagctcttcctcaaggagaccatggagcccgagcacggcctcaccccctggaacgaggtcaagaaggcccgccgcgaggacctcgccaacctcatgaagaagtactaccccggcgagaaggcctggtccgtctccctcaagatcttcggcaagatgaacctcaaggacctctgcgagcgcgccaaggaggagatcaactggtccgcccagaccatcggccccgacgacgccaaggccggcgagacccaggaggaccaggaggccgtcctcggcgacggcaccgagtaccgcaaccgcatcaaggagaagttctgcatcacctgggacaagaagtccctcgccggcaagcccgaggacttccaccacggcatcgccgagaaggaccgcaagctcctcgagcacctcttcgacgtcgacgtcaagaccggcgcccagccccagatcgtcgtcctccagggcgccgccggcgtcggcaagaccaccctcgtccgcaaggccatgctcgactgggccgagggctccctctaccagcagcgcttcaagtacgtcttctacctcaacggccgcgagatcaaccagctcaaggagcgctccttcgcccagctcatctccaaggactggccctccaccgagggccccatcgaggagatcatgtaccagccctcctccctcctcttcatcatcgactccttcgacgagctcaacttcgccttcgaggagcccgagttcgccctctgcgaggactggacccaggagcaccccgtctccttcctcatgtcctccctcctccgcaaggtcatgctccccgaggcctccctcctcgtcaccacccgcctcaccacctccaagcgcctcaagcagctcctcaagaaccaccactacgtcgagctcctcggcatgtccgaggacgcccgcgaggagtacatctaccagttcttcgaggacaagcgctgggccatgaaggtcttctcctccctcaagtccaacgagatgctcttctccatgtgccaggtccccctcgtctgctgggccgcctgcacctgcctcaagcagcagatggagaagggcggcgacgtcaccctcacctgccagaccaccaccgccctcttcacctgctacatctcctccctcttcacccccgtcgacggcggctccccctccctccccaaccaggcccagctccgccgcctctgccaggtcgccgccaagggcatctggaccatgacctacgtcttctaccgcgagaacctccgccgcctcggcctcacccagtccgacgtctcctccttcatggactccaacatcatccagaaggacgccgagtacgagaactgctacgtcttcacccacctccacgtccaggagttcttcgccgccatgttctacatgctcaagggctcctgggaggccggcaacccctcctgccagcccttcgaggacctcaagtccctcctccagtccacctcctacaaggacccccacctcacccagatgaagtgcttcctcttcggcctcctcaacgaggaccgcgtcaagcagctcgagcgcaccttcaactgcaagatgtccctcaagatcaagtccaagctcctccagtgcatggaggtcctcggcaactccgactactccccctcccagctcggcttcctcgagctcttccactgcctctacgagacccaggacaaggccttcatctcccaggccatgcgctgcttccccaaggtcgccatcaacatctgcgagaagatccacctcctcgtctcctccttctgcctcaagcactgccgctgcctccgcaccatccgcctctccgtcaccgtcgtcttcgagaagaagatcctcaagacctccctccccaccaacacctgggacggcgaccgcatcacccactgctggcaggacctctgctccgtcctccacaccaacgagcacctccgcgagctcgacctctaccactccaacctcgacaagtccgccatgaacatcctccaccacgagctccgccaccccaactgcaagctccagaagctcctcctcaagttcatcaccttccccgacggctgccaggacatctccacctccctcatccacaacaagaacctcatgcacctcgacctcaagggctccgacatcggcgacaacggcgtcaagtccctctgcgaggccctcaagcaccccgagtgcaagctccagaccctccgcctcgagtcctgcaacctcaccgtcttctgctgcctcaacatctccaacgccctcatccgctcccagtccctcatcttcctcaacctctccaccaacaacctcctcgacgacggcgtccagctcctctgcgaggccctccgccaccccaagtgctacctcgagcgcctctccctcgagtcctgcggcctcaccgaggccggctgcgagtacctctccctcgccctcatctccaacaagcgcctcacccacctctgcctcgccgacaacgtcctcggcgacggcggcgtcaagctcatgtccgacgccctccagcacgcccagtgcaccctcaagtccctcgtcctccgccgctgccacttcacctccctctcctccgagtacctctccacctccctcctccacaacaagtccctcacccacctcgacctcggctccaactggctccaggacaacggcgtcaagctcctctgcgacgtcttccgccacccctcctgcaacctccaggacctcgagctcatgggctgcgtcctcaccaacgcctgctgcctcgacctcgcctccgtcatcctcaacaaccccaacctccgctccctcgacctcggcaacaacgacctccaggacgacggcgtcaagatcctctgcgacgccctccgctaccccaactgcaacatccagcgcctcggcctcgagtactgcggcctcacctccctctgctgccaggacctctcctccgccctcatctgcaacaagcgcctcatcaagatgaacctcacccagaacaccctcggctacgagggcatcgtcaagctctacaaggtcctcaagtcccccaagtgcaagctccaggtcctcggcctctgcaaggaggccttcgacgaggaggcccagaagctcctcgaggccgtcggcgtctccaacccccacctcatcatcaagcccgactgcaactaccacaacgaggaggacgtctcctggtggtggtgcttctga

SEQ ID NO: 9141 - RNA, 3282 nt, synthetic construct
  misc_feature 1..3282: note = derived and/or modified sequence opt3 fromNLRP14__Homo_sapiens__AAO18165
  source 1..3282: mol_type = other RNA
atggccgacagctcctcttcaagtttctttcccgatttcggcctgctcctttacctggaggaattgaacaaggaggaattaaatacctttaaactgttcctaaaggagacaatggaacctgagcacgggctcactccatggaacgaggtgaaaaaggctagaagggaagacctggcaaatcttatgaaaaagtattacccgggagagaaggcctggagcgtctccctgaaaatctttggtaagatgaacttgaaagatctctgcgaacgggcgaaggaggagattaattggtctgctcagacgataggccccgacgatgccaaagcaggggaaacccaagaggaccaggaagccgttctgggagatggcacagagtatcgcaaccgaatcaaggaaaagttctgtattacttgggacaaaaagtcgctggctggtaaacctgaggattttcatcacgggatcgcagagaaggaccgtaaactcttagaacatctgttcgatgtggacgtaaagaccggagcccagccacagattgtggtccttcaaggcgctgccggcgtggggaaaacaaccttggttagaaaggcgatgctggattgggcagagggatcactataccagcagaggtttaagtatgtgttctacctcaatggtcgggaaatcaaccagctgaaagagcgcagctttgcccaacttataagtaaggactggccctccactgaaggccctatcgaggagattatgtatcagccatctagcctgttgttcatcattgactcctttgatgaactcaatttcgctttcgaggaacccgagtttgccctgtgcgaagactggacacaggagcaccctgtctcattcttaatgagtagcctgctcagaaaagtgatgcttccagaggcatctctgttggtaaccacgaggctaactacctccaagcggctgaaacagctcctgaagaaccatcactacgttgaacttctggggatgtcagaggatgctcgcgaagagtacatctatcaatttttcgaggacaagcgatgggccatgaaagtgtttagcagtttgaagtctaatgaaatgctgttctccatgtgtcaggtcccgctcgtgtgctgggcggcctgtacatgcttaaaacagcaaatggagaagggaggcgatgtgactctgacctgtcagacaaccacggcactatttacttgctacataagctctctcttcacacccgtcgacggtgggtcgccttccctgccaaaccaggctcagcttagaaggttgtgtcaagttgccgctaaaggaatttggaccatgacttatgtgttttaccgggaaaatctgcgtcgcctcggcctgacacagtcagatgtaagtagcttcatggactccaacatcattcagaaggatgccgagtatgaaaattgctacgtgtttacccaccttcatgtccaggagttctttgcagccatgttctatatgctgaagggctcttgggaggctgggaaccccagctgtcaacctttcgaagacttgaaatcactcctgcagagtacgtcctacaaggatccacacttaacccagatgaaatgctttctgttcggactactcaacgaggacagagtgaagcagctggaaaggacatttaattgcaaaatgagccttaagatcaagtctaaattgctgcaatgtatggaggttctcggtaactcagactacagtcccagccagctgggcttcttagaactgtttcattgcctttatgagactcaggataaggcgttcatctcccaggcaatgcggtgttttccgaaagtggccattaatatatgcgagaagatccacttgctcgtctcttcgttctgtctgaaacactgccgatgtctacgcaccattagactgagcgtgacagtagtttttgaaaagaaaatcctcaagacttccctgcctaccaacacatgggacggggataggataacccattgctggcaagacctttgttcagtgttgcacactaatgagcatctgcgggaattagatctctaccacagtaacctggacaagtctgctatgaatattcttcatcacgagctgcgccaccccaactgcaaattgcagaagctcctgctaaaattcatcacgtttccagatggatgtcaggacatcagcacatccctgattcataataagaacctcatgcacctggatcttaaaggctcagacatcggtgataatggggtcaagagcttgtgcgaagccctgaagcatcctgagtgcaaattacaaaccctcagactggagtcttgtaaccttactgtgttctgctgtctgaatatttccaacgcactaataaggagtcagagcctcatctttctgaatttgtctaccaacaacctgttagacgatggcgtccagctcctgtgcgaagcccttcgtcaccccaagtgttatctggagcggttgtccctcgaatcatgcggactgacagaggctggctgtgagtacctaagtctggcccttattagcaataaacgactcacccacctgtgcttggcagacaacgtgctgggggacggaggtgttaagttaatgtcggatgcgctccagcatgctcaatgtactctgaaatcccttgtgctgagaaggtgccacttcacatctttgagctcagaatatctcagtacgtccctgctacataataagtctctgacccaccttgacctcggcagcaactggctgcaggataatggggtaaagttgttatgtgacgtcttccgccatccatcctgcaacctgcaggatctcgagctgatgggatgcgtgcttactaatgcctgttgcctggacttggcatcagttatcctaaacaatcccaacctgcggagcctcgatctgggcaataacgaccttcaggatgacggtgtgaaaatcttatgtgatgccctgagataccctaattgcaacattcaaaggctcgggttggaatattgtggcctgacaagtctctgctgtcaggacctgtcttccgctcttatatgcaataagcgcctgatcaaaatgaacttgacccagaacacactaggatacgagggcattgtcaagctgtacaaagtgctcaagagcccaaagtgtaaattacaggtactggggctttgcaaggaagcctttgatgaggaggcacaaaaactgctcgaagctgtgggagtttcgaatccgcacttgatcattaagcccgactgtaactatcacaatgaggaagacgtctcatggtggtggtgcttctga

SEQ ID NO: 9142 - RNA, 3282 nt, synthetic construct
  misc_feature 1..3282: note = derived and/or modified sequence opt4 fromNLRP14__Homo_sapiens__AAO18165
  source 1..3282: mol_type = other RNA
atggccgacagcagcagcagcagcttcttccccgacttcggcctgctgctgtacctggaggagctgaacaaggaggagctgaacaccttcaagctgttcctgaaggagaccatggagcccgagcacggcctgaccccctggaacgaggtgaagaaggccagaagagaggacctggccaacctgatgaagaagtactaccccggcgagaaggcctggagcgtgagcctgaagatcttcggcaagatgaacctgaaggacctgtgcgagagagccaaggaggagatcaactggagcgcccagaccatcggccccgacgacgccaaggccggcgagacccaggaggaccaggaggccgtgctgggcgacggcaccgagtacagaaacagaatcaaggagaagttctgcatcacctgggacaagaagagcctggccggcaagcccgaggacttccaccacggcatcgccgagaaggacagaaagctgctggagcacctgttcgacgtggacgtgaagaccggcgcccagccccagatcgtggtgctgcagggcgccgccggcgtgggcaagaccaccctggtgagaaaggccatgctggactgggccgagggcagcctgtaccagcagagattcaagtacgtgttctacctgaacggcagagagatcaaccagctgaaggagagaagcttcgcccagctgatcagcaaggactggcccagcaccgagggccccatcgaggagatcatgtaccagcccagcagcctgctgttcatcatcgacagcttcgacgagctgaacttcgccttcgaggagcccgagttcgccctgtgcgaggactggacccaggagcaccccgtgagcttcctgatgagcagcctgctgagaaaggtgatgctgcccgaggccagcctgctggtgaccaccagactgaccaccagcaagagactgaagcagctgctgaagaaccaccactacgtggagctgctgggcatgagcgaggacgccagagaggagtacatctaccagttcttcgaggacaagagatgggccatgaaggtgttcagcagcctgaagagcaacgagatgctgttcagcatgtgccaggtgcccctggtgtgctgggccgcctgcacctgcctgaagcagcagatggagaagggcggcgacgtgaccctgacctgccagaccaccaccgccctgttcacctgctacatcagcagcctgttcacccccgtggacggcggcagccccagcctgcccaaccaggcccagctgagaagactgtgccaggtggccgccaagggcatctggaccatgacctacgtgttctacagagagaacctgagaagactgggcctgacccagagcgacgtgagcagcttcatggacagcaacatcatccagaaggacgccgagtacgagaactgctacgtgttcacccacctgcacgtgcaggagttcttcgccgccatgttctacatgctgaagggcagctgggaggccggcaaccccagctgccagcccttcgaggacctgaagagcctgctgcagagcaccagctacaaggacccccacctgacccagatgaagtgcttcctgttcggcctgctgaacgaggacagagtgaagcagctggagagaaccttcaactgcaagatgagcctgaagatcaagagcaagctgctgcagtgcatggaggtgctgggcaacagcgactacagccccagccagctgggcttcctggagctgttccactgcctgtacgagacccaggacaaggccttcatcagccaggccatgagatgcttccccaaggtggccatcaacatctgcgagaagatccacctgctggtgagcagcttctgcctgaagcactgcagatgcctgagaaccatcagactgagcgtgaccgtggtgttcgagaagaagatcctgaagaccagcctgcccaccaacacctgggacggcgacagaatcacccactgctggcaggacctgtgcagcgtgctgcacaccaacgagcacctgagagagctggacctgtaccacagcaacctggacaagagcgccatgaacatcctgcaccacgagctgagacaccccaactgcaagctgcagaagctgctgctgaagttcatcaccttccccgacggctgccaggacatcagcaccagcctgatccacaacaagaacctgatgcacctggacctgaagggcagcgacatcggcgacaacggcgtgaagagcctgtgcgaggccctgaagcaccccgagtgcaagctgcagaccctgagactggagagctgcaacctgaccgtgttctgctgcctgaacatcagcaacgccctgatcagaagccagagcctgatcttcctgaacctgagcaccaacaacctgctggacgacggcgtgcagctgctgtgcgaggccctgagacaccccaagtgctacctggagagactgagcctggagagctgcggcctgaccgaggccggctgcgagtacctgagcctggccctgatcagcaacaagagactgacccacctgtgcctggccgacaacgtgctgggcgacggcggcgtgaagctgatgagcgacgccctgcagcacgcccagtgcaccctgaagagcctggtgctgagaagatgccacttcaccagcctgagcagcgagtacctgagcaccagcctgctgcacaacaagagcctgacccacctggacctgggcagcaactggctgcaggacaacggcgtgaagctgctgtgcgacgtgttcagacaccccagctgcaacctgcaggacctggagctgatgggctgcgtgctgaccaacgcctgctgcctggacctggccagcgtgatcctgaacaaccccaacctgagaagcctggacctgggcaacaacgacctgcaggacgacggcgtgaagatcctgtgcgacgccctgagataccccaactgcaacatccagagactgggcctggagtactgcggcctgaccagcctgtgctgccaggacctgagcagcgccctgatctgcaacaagagactgatcaagatgaacctgacccagaacaccctgggctacgagggcatcgtgaagctgtacaaggtgctgaagagccccaagtgcaagctgcaggtgctgggcctgtgcaaggaggccttcgacgaggaggcccagaagctgctggaggccgtgggcgtgagcaacccccacctgatcatcaagcccgactgcaactaccacaacgaggaggacgtgagctggtggtggtgcttctga

SEQ ID NO: 9143 - RNA, 3282 nt, synthetic construct
  misc_feature 1..3282: note = derived and/or modified sequence opt5 fromNLRP14__Homo_sapiens__AAO18165
  source 1..3282: mol_type = other RNA
atggccgacagctcctctagctccttctttcccgatttcggcctgctcctgtaccttgaggaactgaacaaggaggaactcaatacctttaaactgttccttaaggagacaatggaacctgagcacgggctgacgccgtggaacgaggtgaaaaaggctagacgggaagacctcgccaatctgatgaaaaagtattaccccggagagaaggcgtggtctgtcagcctgaaaatctttggcaagatgaacctcaaagatctgtgcgaacgcgctaaggaggagattaattggtccgcccagaccatcgggcctgacgatgccaaagctggagaaacacaagaggaccaggaagccgttcttggcgatgggaccgagtatagaaaccggattaaggaaaagttctgtatcacatgggacaaaaagtctctggctggaaaacccgaggattttcatcacggcattgccgagaaggaccgcaaactcctggaacatcttttcgatgtggacgtgaagaccggcgcgcagcctcagatcgtcgtgctgcaaggggccgctggagttggcaaaacaaccctcgtgagaaaggccatgctggattgggctgaggggagcctgtaccagcagcggtttaagtatgtcttctacctcaatggacgcgaaatcaaccagctgaaagagagatcctttgcccaacttattagcaaggactggccctctacggaaggccctatcgaggagattatgtatcagccgtccagcctgctgttcatcattgactcttttgatgaactgaatttcgcgttcgaggaacccgagtttgccctttgcgaagactggacccaggagcaccctgtgtccttcctgatgagctctctcctgcggaaagttatgctgcccgaggcttccctcctggtgacaacccgccttacaaccagcaagagactgaaacagctcctgaagaaccatcactacgtcgaacttctggggatgtccgaggatgcccgggaagagtacatctatcaatttttcgaggacaagcgctgggctatgaaagtgttttctagcctcaagtccaatgaaatgctgttcagcatgtgtcaggtgcctctggtctgctgggccgcctgtacgtgcctcaaacagcaaatggagaagggaggcgatgttacactgacctgtcagacaaccaccgctctttttacatgctacatttcttccctgttcacgcccgtggacggcgggagcccgtctctccctaaccaggcgcagctgagacggctgtgtcaagtggccgctaaaggaatctggaccatgacatatgtcttttaccgcgaaaatcttagacggctcggcctgacccagagcgatgtgtcctctttcatggacagcaacatcattcagaaggatgccgagtatgaaaattgctacgtttttacacacctccatgtgcaggagttctttgccgctatgttctatatgctcaaggggtcctgggaggccggaaaccccagctgtcaacctttcgaagacctgaaatctcttctgcagtccaccagctacaaggatccccacctcacgcagatgaaatgctttctgttcggcctgcttaacgaggacagagtcaagcagctcgaacgcacatttaattgcaaaatgtctctgaagatcaagtccaaactgctccaatgtatggaggtgctggggaacagcgactactccccctctcagcttggattcctggaactctttcattgcctgtatgagacccaggataaggcgttcattagccaggctatgcggtgttttcctaaagttgccatcaatatttgcgagaagatccaccttcttgtgtcctctttctgtctcaaacactgcagatgtctgcgcaccatccggctgagcgtcacagtggtctttgaaaagaaaattctcaagacctccctgccgacaaacacgtgggacggcgatagaatcacccattgctggcaagacctttgtagcgtgctgcacacaaatgagcatctccgcgaactggatctgtaccactctaaccttgacaagtccgccatgaatattctccatcacgagctgcggcaccccaactgcaaactgcagaagctcctgcttaaattcatcacctttcctgatggctgtcaggacattagcacatctctgatccataataagaacctcatgcacctggatctgaaagggtccgacatcggagataatggcgttaagagcctttgcgaagctctgaagcatcccgagtgcaaactccaaaccctgagactcgagtcttgtaacctgacggtgttctgctgtcttaatattagcaacgccctgatccgctcccagagcctcatttttctgaatctgtctaccaacaaccttctggacgatggggtccagctcctgtgcgaagctctccggcaccctaagtgttatctggagagactttccctggaaagctgcggactcacagaggccggctgtgagtacctgtccctggcgcttatctctaataaacgcctgacccacctctgcctggccgacaacgtgctcggggacggcggagttaagctgatgagcgatgctctgcagcatgcccaatgtacactgaaatccctggtgctccggagatgccacttcacctctctgagctccgaatatctttctacgagcctgctccataataagtccctgacacacctcgacctgggcagcaactggcttcaggataatggggtcaagctgctgtgtgacgtgttccggcatccctcttgcaacctccaggatctggagcttatgggatgcgtgctgaccaatgcttgttgcctcgacctggcctccgttattctcaacaatccgaacctgcgcagccttgatctgggcaataacgacctgcaggatgacggggtcaaaatcctctgtgatgcgctgagataccctaattgcaacattcaacggcttggactggaatattgtggcctcacatctctgtgctgtcaggacctctccagcgccctgatctgcaataagagacttatcaaaatgaacctgacccagaacaccctggggtacgagggcattgtgaagctctacaaagtgctgaagtctcccaagtgtaaacttcaggtcctgggactctgcaaggaggcttttgatgaagaggcccaaaaactgctggaagctgtgggcgtttccaatcctcacctcatcattaagcccgactgtaactatcacaatgaggaagacgtgagctggtggtggtgcttctga

SEQ ID NO: 9144 - protein, 779 aa, synthetic construct
  REGION 1..779: note = NOD1__Homo_sapiens__G3XAL1
MEEQGHSEMEIIPSESHPHIQLLKSNRELLVTHIRNTQCLVDNLLKNDYFSAEDAEIVCACPTQPDKVRKILDLVQSKGEEVSEFFLYLLQQLADAYVDLRPWLLEIGFSPSLLTQSKVVVNTDPVSRYTQQLRHHLGRDSKFVLCYAQKEELLLEEIYMDTIMELVGFSNESLGSLNSLACLLDHTTGILNEQGETIFILGDAGVGKSMLLQRLQSLWATGRLDAGVKFFFHFRCRMFSCFKESDRLCLQDLLFKHYCYPERDPEEVFAFLLRFPHVALFTFDGLDELHSDLDLSRVPDSSCPWEPAHPLVLLANLLSGKLLKGASKLLTARTGIEVPRQFLRKKVLLRGFSPSHLRAYARRMFPERALQDRLLSQLEANPNLCSLCSVPLFCWIIFRCFQHFRAAFEGSPQLPDCTMTLTDVFLLVTEVHLNRMQPSSLVQRNTRSPVETLHAGRDTLCSLGQVAHRGMEKSLFVFTQEEVQASGLQERDMQLGFLRALPELGPGGDQQSYEFFHLTLQAFFTAFFLVLDDRVGTQELLRFFQEWMPPAGAATTSCYPPFLPFQCLQGSGPAREDLFKNKDHFQFTNLFLCGLLSKAKQKLLRHLVPAAALRRKRKALWAHLFSSLRGYLKSLPRVQVESFNQVQAMPTFIWMLRCIYETQSQKVGQLAARGICANYLKLTYCNACSADCSALSFVLHHFPKRLALDLDNNNLNDYGVRELQPCFSRLTVLRLSVNQITDGGVKVLSEELTKYKIVTYLGLWKSVDTICFKKQGLLK

SEQ ID NO: 9145 - RNA, 2340 nt, synthetic construct
  misc_feature 1..2340: note = NOD1__Homo_sapiens__EAW93948
  source 1..2340: mol_type = other RNA
atggaagagcagggccacagtgagatggaaataatcccatcagagtctcacccccacattcaattactgaaaagcaatcgggaacttctggtcactcacatccgcaatactcagtgtctggtggacaacttgctgaagaatgactacttctcggccgaagatgcggagattgtgtgtgcctgccccacccagcctgacaaggtccgcaaaattctggacctggtacagagcaagggcgaggaggtgtccgagttcttcctctacttgctccagcaactcgcagatgcctacgtggacctcaggccttggctgctggagatcggcttctccccttccctgctcactcagagcaaagtcgtggtcaacactgacccagtgagcaggtatacccagcagctgcgacaccatctgggccgtgactccaagttcgtgctgtgctatgcccagaaggaggagctgctgctggaggagatctacatggacaccatcatggagctggttggcttcagcaatgagagcctgggcagcctgaacagcctggcctgcctcctggaccacaccaccggcatcctcaatgagcagggtgagaccatcttcatcctgggtgatgctggggtgggcaagtccatgctgctacagcggctgcagagcctctgggccacgggccggctagacgcaggggtcaaattcttcttccactttcgctgccgcatgttcagctgcttcaaggaaagtgacaggctgtgtctgcaggacctgctcttcaagcactactgctacccagagcgggaccccgaggaggtgtttgccttcctgctgcgcttcccccacgtggccctcttcaccttcgatggcctggacgagctgcactcggacttggacctgagccgcgtgcctgacagctcctgcccctgggagcctgcccaccccctggtcttgctggccaacctgctcagtgggaagctgctcaagggggctagcaagctgctcacagcccgcacaggcatcgaggtcccgcgccagttcctgcggaagaaggtgcttctccggggcttctcccccagccacctgcgcgcctatgccaggaggatgttccccgagcgggccctgcaggaccgcctgctgagccagctggaggccaaccccaacctctgcagcctgtgctctgtgcccctcttctgctggatcatcttccggtgcttccagcacttccgtgctgcctttgaaggctcaccacagctgcccgactgcacgatgaccctgacagatgtcttcctcctggtcactgaggtccatctgaacaggatgcagcccagcagcctggtgcagcggaacacacgcagcccagtggagaccctccacgccggccgggacactctgtgctcgctggggcaggtggcccaccggggcatggagaagagcctctttgtcttcacccaggaggaggtgcaggcctccgggctgcaggagagagacatgcagctgggcttcctgcgggctttgccggagctgggccccgggggtgaccagcagtcctatgagtttttccacctcaccctccaggccttctttacagccttcttcctcgtgctggacgacagggtgggcactcaggagctgctcaggttcttccaggagtggatgccccctgcgggggcagcgaccacgtcctgctatcctcccttcctcccgttccagtgcctgcagggcagtggtccggcgcgggaagacctcttcaagaacaaggatcacttccagttcaccaacctcttcctgtgcgggctgttgtccaaagccaaacagaaactcctgcggcatctggtgcccgcggcagccctgaggagaaagcgcaaggccctgtgggcacacctgttttccagcctgcggggctacctgaagagcctgccccgcgttcaggtcgaaagcttcaaccaggtgcaggccatgcccacgttcatctggatgctgcgctgcatctacgagacacagagccagaaggtggggcagctggcggccaggggcatctgcgccaactacctcaagctgacctactgcaacgcctgctcggccgactgcagcgccctctccttcgtcctgcatcacttccccaagcggctggccctagacctagacaacaacaatctcaacgactacggcgtgcgggagctgcagccctgcttcagccgcctcactgttctcagactcagcgtaaaccagatcactgacggtggggtaaaggtgctaagcgaagagctgaccaaatacaaaattgtgacctatttgggactttggaaatcagtagacaccatatgcttcaaaaaacaggggctattaaaatga

SEQ ID NO: 9146 - RNA, 2340 nt, synthetic construct
  misc_feature 1..2340: note = derived and/or modified sequence opt1 fromNOD1__Homo_sapiens__EAW93948
  source 1..2340: mol_type = other RNA
atggaggagcagggccacagcgagatggagatcatcccctccgagagccacccgcacatccagctgctcaagtccaaccgcgagctgctggtgacccacatccggaacacccagtgcctcgtcgacaacctgctgaagaacgactacttcagcgccgaggacgccgagatcgtgtgcgcgtgccccacgcagcccgacaaggtgcgcaagatcctcgacctggtccagtccaagggggaggaggtgagcgagttcttcctgtacctcctgcagcagctggccgacgcctacgtggacctccggccctggctgctggagatcggcttctccccgagcctcctgacccagtccaaggtcgtggtgaacaccgaccccgtcagccgctacacccagcagctgcggcaccacctcgggcgcgactccaagttcgtgctgtgctacgcccagaaggaggagctgctcctggaggagatctacatggacacgatcatggagctggtgggcttcagcaacgagtccctcgggagcctgaactccctggcctgcctcctggaccacaccaccggcatcctgaacgagcagggcgagaccatcttcatcctcggggacgcgggcgtcggcaagagcatgctgctgcagcggctccagtccctgtgggccacggggcgcctggacgccggggtgaagttcttcttccacttccggtgccgcatgttcagctgcttcaaggagtccgaccggctctgcctgcaggacctgctgttcaagcactactgctaccccgagcgcgaccccgaggaggtgttcgccttcctgctgcggttcccgcacgtcgcgctgttcaccttcgacggcctggacgagctgcacagcgacctcgacctgagccgcgtgcccgactccagctgcccctgggagcccgcccacccgctggtgctcctggccaacctgctgtccggcaagctcctgaagggggccagcaagctgctcaccgcccggaccggcatcgaggtcccccgccagttcctgcggaagaaggtgctgctccgcgggttctcccccagccacctccgggcgtacgcccgccggatgttccccgagcgcgccctgcaggaccgcctcctgtcccagctggaggccaacccgaacctctgcagcctgtgctccgtgcccctgttctgctggatcatcttccggtgcttccagcacttccgcgccgcgttcgagggcagcccccagctccccgactgcacgatgaccctgaccgacgtcttcctgctcgtgaccgaggtgcacctgaaccggatgcagccgtccagcctggtccagcgcaacacgcggtcccccgtggagaccctccacgccggccgcgacaccctgtgcagcctggggcaggtcgcccaccggggcatggagaagtccctcttcgtgttcacccaggaggaggtgcaggccagcgggctgcaggagcgcgacatgcagctgggcttcctccgggccctgcccgagctggggcccggcggcgaccagcagtcctacgagttcttccacctcacgctgcaggcgttcttcaccgccttcttcctggtcctcgacgaccgcgtggggacccaggagctgctgcggttcttccaggagtggatgccgcccgccggcgccgccaccacgagctgctacccgcccttcctccccttccagtgcctgcaggggtccggccccgcgcgcgaggacctgttcaagaacaaggaccacttccagttcaccaacctcttcctgtgcgggctgctcagcaaggccaagcagaagctgctgcggcacctcgtgcccgccgccgcgctgcgccggaagcgcaaggccctgtgggcccacctcttcagctccctgcggggctacctcaagagcctcccgcgcgtccaggtggagtccttcaaccaggtgcaggccatgcccaccttcatctggatgctgcggtgcatctacgagacccagagccagaaggtcggccagctggccgcgcgcgggatctgcgccaactacctcaagctgacgtactgcaacgcctgctccgccgactgcagcgccctgtccttcgtgctccaccacttccccaagcgcctggcgctggacctcgacaacaacaacctgaacgactacggcgtgcgggagctgcagccctgcttcagccgcctcaccgtcctgcggctgtccgtgaaccagatcaccgacgggggcgtgaaggtcctcagcgaggagctgaccaagtacaagatcgtgacgtacctggggctctggaagtccgtggacaccatctgcttcaagaagcagggcctgctgaagtga

SEQ ID NO: 9147 - RNA, 2340 nt, synthetic construct
  misc_feature 1..2340: note = derived and/or modified sequence opt2 fromNOD1__Homo_sapiens__EAW93948
  source 1..2340: mol_type = other RNA
atggaggagcagggccactccgagatggagatcatcccctccgagtcccacccccacatccagctcctcaagtccaaccgcgagctcctcgtcacccacatccgcaacacccagtgcctcgtcgacaacctcctcaagaacgactacttctccgccgaggacgccgagatcgtctgcgcctgccccacccagcccgacaaggtccgcaagatcctcgacctcgtccagtccaagggcgaggaggtctccgagttcttcctctacctcctccagcagctcgccgacgcctacgtcgacctccgcccctggctcctcgagatcggcttctccccctccctcctcacccagtccaaggtcgtcgtcaacaccgaccccgtctcccgctacacccagcagctccgccaccacctcggccgcgactccaagttcgtcctctgctacgcccagaaggaggagctcctcctcgaggagatctacatggacaccatcatggagctcgtcggcttctccaacgagtccctcggctccctcaactccctcgcctgcctcctcgaccacaccaccggcatcctcaacgagcagggcgagaccatcttcatcctcggcgacgccggcgtcggcaagtccatgctcctccagcgcctccagtccctctgggccaccggccgcctcgacgccggcgtcaagttcttcttccacttccgctgccgcatgttctcctgcttcaaggagtccgaccgcctctgcctccaggacctcctcttcaagcactactgctaccccgagcgcgaccccgaggaggtcttcgccttcctcctccgcttcccccacgtcgccctcttcaccttcgacggcctcgacgagctccactccgacctcgacctctcccgcgtccccgactcctcctgcccctgggagcccgcccaccccctcgtcctcctcgccaacctcctctccggcaagctcctcaagggcgcctccaagctcctcaccgcccgcaccggcatcgaggtcccccgccagttcctccgcaagaaggtcctcctccgcggcttctccccctcccacctccgcgcctacgcccgccgcatgttccccgagcgcgccctccaggaccgcctcctctcccagctcgaggccaaccccaacctctgctccctctgctccgtccccctcttctgctggatcatcttccgctgcttccagcacttccgcgccgccttcgagggctccccccagctccccgactgcaccatgaccctcaccgacgtcttcctcctcgtcaccgaggtccacctcaaccgcatgcagccctcctccctcgtccagcgcaacacccgctcccccgtcgagaccctccacgccggccgcgacaccctctgctccctcggccaggtcgcccaccgcggcatggagaagtccctcttcgtcttcacccaggaggaggtccaggcctccggcctccaggagcgcgacatgcagctcggcttcctccgcgccctccccgagctcggccccggcggcgaccagcagtcctacgagttcttccacctcaccctccaggccttcttcaccgccttcttcctcgtcctcgacgaccgcgtcggcacccaggagctcctccgcttcttccaggagtggatgccccccgccggcgccgccaccacctcctgctacccccccttcctccccttccagtgcctccagggctccggccccgcccgcgaggacctcttcaagaacaaggaccacttccagttcaccaacctcttcctctgcggcctcctctccaaggccaagcagaagctcctccgccacctcgtccccgccgccgccctccgccgcaagcgcaaggccctctgggcccacctcttctcctccctccgcggctacctcaagtccctcccccgcgtccaggtcgagtccttcaaccaggtccaggccatgcccaccttcatctggatgctccgctgcatctacgagacccagtcccagaaggtcggccagctcgccgcccgcggcatctgcgccaactacctcaagctcacctactgcaacgcctgctccgccgactgctccgccctctccttcgtcctccaccacttccccaagcgcctcgccctcgacctcgacaacaacaacctcaacgactacggcgtccgcgagctccagccctgcttctcccgcctcaccgtcctccgcctctccgtcaaccagatcaccgacggcggcgtcaaggtcctctccgaggagctcaccaagtacaagatcgtcacctacctcggcctctggaagtccgtcgacaccatctgcttcaagaagcagggcctcctcaagtga

SEQ ID NO: 9148 - RNA, 2340 nt, synthetic construct
  misc_feature 1..2340: note = derived and/or modified sequence opt3 fromNOD1__Homo_sapiens__EAW93948
  source 1..2340: mol_type = other RNA
atggaggaacagggccacagcgagatggaaatcattccctccgagtctcatcctcacatacaactgctcaagtcaaacagagaacttctggtgacccatatcaggaatacacagtgcttggtcgacaacttactgaaaaatgattacttcagtgccgaggacgctgagattgtttgtgcatgcccaactcagccggataaggtgcggaaaatcctagacctcgtacagagcaagggggaagaggtgtccgaatttttcctgtatcttctgcaacagttggccgatgcgtacgtcgacctccgcccctggctgctggagattggattttctccttcgctcttaacgcagtcaaaagtggttgtgaacaccgatccagtcagccgatatacacagcaactgcgtcaccatcttggtagagacagtaagttcgtgttgtgttacgctcagaaggaggaactgctactcgaggaaatctatatggatactataatggagctggtaggcttttccaatgaatctcttgggagcctgaactccttggcctgcctcctggaccacaccacaggaatcttaaatgagcagggcgagaccattttcatcctgggtgatgcaggggttggaaaatcaatgctccttcagaggctgcaaagtttgtgggccactggccggctagacgctggcgtgaagtttttctttcacttccgctgtagaatgtttagctgcttcaaagaatctgataggctgtgtctccaggacctgctttttaagcattactgctatcccgagcgggaccctgaagaggtcttcgcattcctgttgcgctttccacacgtggccctcttcacatttgatgggctggacgaattacattccgatctggacctatcacgagtgcccgatagcagttgtccttgggagccagctcacccgctcgtcctgcttgccaacttgctgtctggaaaactcctgaagggtgcgtccaaacttctgaccgcaagaacgggcattgaggttcccaggcagttcttgcggaagaaggtgctcctgcgtgggtttagcccttcgcacttacgcgcctacgctagaaggatgttcccagaacgggccctgcaagaccgactactctctcagctggaggcaaatcccaacctttgctccttgtgttcagtacctctgttttgctggatcatattccgctgctttcagcatttcagagctgcctttgaaggaagtccacagctccccgattgtactatgaccctgacagacgtgttcttactggtcactgaggtgcaccttaataggatgcaaccgagctccttggttcagcggaacacccgctctcctgtggaaacactccatgcgggcagagataccctgtgcagcctaggtcaggtcgcccacagggggatggagaaatcactgtttgtgttcacgcaggaggaagtacaagcaagtggactccaggagcgtgacatgcagctgggcttccttcgggctttgcccgaactgggcccagggggagatcagcaatcctacgagtttttccatttaactctccaggcctttttcacagcctttttcctggttcttgacgaccgagtgggtacccaggagctgttgagatttttccaggaatggatgcctcccgctggcgcagccactacaagctgttatccaccctttctccctttccaatgcctgcaggggtctggaccagctagggaggatctatttaagaataaagaccacttccagtttaccaacctgttcctctgtggcctgctttcaaaggcgaaacaaaagttgctgcgccacttagtcccggcagccgctctccggagaaagaggaaagccctgtgggcacatcttttcagtagcctgcgcggttacctaaagtccctcccccgagtgcaggtcgaatcttttaatcaggtgcaggccatgcctacgttcatttggatgctgcggtgcatctatgagacccaatcgcagaaagttgggcagttggctgcccgtggcatttgtgcaaactacctgaagttaacatattgcaacgcgtgtagcgctgattgctccgccctctcatttgtgctgcaccatttcccaaaaagacttgcactggacttggataataacaatctcaacgactacggagtaagggaactgcagccctgttttagtcgcctaactgtcctgcggctttctgtgaatcaaatcaccgatggcggggttaaggtgctcagcgaggagctgacaaagtataaaatcgtcacttacttgggactgtggaagtccgtggacaccatttgcttcaaaaagcagggtttactcaaatga

SEQ ID NO: 9149 - RNA, 2340 nt, synthetic construct
  misc_feature 1..2340: note = derived and/or modified sequence opt4 fromNOD1__Homo_sapiens__EAW93948
  source 1..2340: mol_type = other RNA
atggaggagcagggccacagcgagatggagatcatccccagcgagagccacccccacatccagctgctgaagagcaacagagagctgctggtgacccacatcagaaacacccagtgcctggtggacaacctgctgaagaacgactacttcagcgccgaggacgccgagatcgtgtgcgcctgccccacccagcccgacaaggtgagaaagatcctggacctggtgcagagcaagggcgaggaggtgagcgagttcttcctgtacctgctgcagcagctggccgacgcctacgtggacctgagaccctggctgctggagatcggcttcagccccagcctgctgacccagagcaaggtggtggtgaacaccgaccccgtgagcagatacacccagcagctgagacaccacctgggcagagacagcaagttcgtgctgtgctacgcccagaaggaggagctgctgctggaggagatctacatggacaccatcatggagctggtgggcttcagcaacgagagcctgggcagcctgaacagcctggcctgcctgctggaccacaccaccggcatcctgaacgagcagggcgagaccatcttcatcctgggcgacgccggcgtgggcaagagcatgctgctgcagagactgcagagcctgtgggccaccggcagactggacgccggcgtgaagttcttcttccacttcagatgcagaatgttcagctgcttcaaggagagcgacagactgtgcctgcaggacctgctgttcaagcactactgctaccccgagagagaccccgaggaggtgttcgccttcctgctgagattcccccacgtggccctgttcaccttcgacggcctggacgagctgcacagcgacctggacctgagcagagtgcccgacagcagctgcccctgggagcccgcccaccccctggtgctgctggccaacctgctgagcggcaagctgctgaagggcgccagcaagctgctgaccgccagaaccggcatcgaggtgcccagacagttcctgagaaagaaggtgctgctgagaggcttcagccccagccacctgagagcctacgccagaagaatgttccccgagagagccctgcaggacagactgctgagccagctggaggccaaccccaacctgtgcagcctgtgcagcgtgcccctgttctgctggatcatcttcagatgcttccagcacttcagagccgccttcgagggcagcccccagctgcccgactgcaccatgaccctgaccgacgtgttcctgctggtgaccgaggtgcacctgaacagaatgcagcccagcagcctggtgcagagaaacaccagaagccccgtggagaccctgcacgccggcagagacaccctgtgcagcctgggccaggtggcccacagaggcatggagaagagcctgttcgtgttcacccaggaggaggtgcaggccagcggcctgcaggagagagacatgcagctgggcttcctgagagccctgcccgagctgggccccggcggcgaccagcagagctacgagttcttccacctgaccctgcaggccttcttcaccgccttcttcctggtgctggacgacagagtgggcacccaggagctgctgagattcttccaggagtggatgccccccgccggcgccgccaccaccagctgctacccccccttcctgcccttccagtgcctgcagggcagcggccccgccagagaggacctgttcaagaacaaggaccacttccagttcaccaacctgttcctgtgcggcctgctgagcaaggccaagcagaagctgctgagacacctggtgcccgccgccgccctgagaagaaagagaaaggccctgtgggcccacctgttcagcagcctgagaggctacctgaagagcctgcccagagtgcaggtggagagcttcaaccaggtgcaggccatgcccaccttcatctggatgctgagatgcatctacgagacccagagccagaaggtgggccagctggccgccagaggcatctgcgccaactacctgaagctgacctactgcaacgcctgcagcgccgactgcagcgccctgagcttcgtgctgcaccacttccccaagagactggccctggacctggacaacaacaacctgaacgactacggcgtgagagagctgcagccctgcttcagcagactgaccgtgctgagactgagcgtgaaccagatcaccgacggcggcgtgaaggtgctgagcgaggagctgaccaagtacaagatcgtgacctacctgggcctgtggaagagcgtggacaccatctgcttcaagaagcagggcctgctgaagtga

SEQ ID NO: 9150 - RNA, 2340 nt, synthetic construct
  misc_feature 1..2340: note = derived and/or modified sequence opt5 fromNOD1__Homo_sapiens__EAW93948
  source 1..2340: mol_type = other RNA
atggaggaacagggccacagcgagatggaaatcattccctccgagtctcatcctcacatccaactgctcaagagcaacagagaactgcttgtgacccatattcggaatacacagtgcctggtcgacaacctcctgaaaaatgattacttctccgccgaggacgctgagatcgtttgtgcctgcccgacgcagcccgataaggtgcgcaaaattcttgacctggtgcagtctaagggggaagaggtcagcgaatttttcctctatctgctgcaacagctcgcggatgcttacgtggacctgagaccttggcttctggagatcggattttccccctctctcctgacccagagcaaagttgtggtcaacacagatcctgtgtcccggtatacccagcaacttcgccaccatctgggcagagacagcaagttcgttctctgttacgcccagaaggaggaactgctgctcgaggaaatctatatggatacaattatggagctggtggggttttctaatgaatcccttggaagcctgaactctctcgcctgcctgcttgaccacaccacaggcatcctgaatgagcagggggagaccattttcatcctcggagatgctggcgtcggcaaatccatgctgctgcagcggctccaaagcctgtgggccacggggcgccttgacgctggagtgaagtttttctttcacttcagatgtcggatgttttcttgcttcaaagaatccgatcgcctgtgtctccaggacctgctttttaagcattactgctatcccgagagagaccctgaagaggtgttcgccttcctgctccggtttccgcacgtcgcgctgttcacctttgatggcctggacgaactccatagcgatctggacctttcccgcgttcccgattctagctgtccttgggagcccgcccaccctctggtgctcctggctaacctgctttccgggaaactcctgaagggagccagcaagctgctcacagctagaaccggcattgaggtgccccggcagttcctgcgcaaaaaggtccttctgagagggttttctccgtcccacctccgggcctacgcgagacgcatgttccctgaacgggccctgcaagacagactgcttagccagctcgaggctaatcccaacctgtgctctctgtgtagcgtgcctctcttttgctggatcattttccgctgctttcagcatttccgggccgcttttgaaggatctccccagctgcccgattgtacaatgacccttacggacgttttcctgctcgtgacagaggtccacctgaatagaatgcaaccttccagcctggtgcagcgcaacacccggtccccggttgaaacacttcatgccggcagagataccctctgcagcctgggccaggtggcccaccgcgggatggagaaatctctgtttgtcttcacccaggaggaagtgcaggcttccggactccaagagcgggacatgcagctgggcttccttagagcgctgcccgaactcgggcctggaggcgatcagcaaagctacgagtttttccatctgacactgcaggcctttttcacggcctttttccttgtcctcgacgaccgcgtggggacccaggagctgctgcggtttttccaggaatggatgccccctgctggagccgctacaacctcttgttatcccccgtttctccctttccaatgcctgcagggctccggccccgccagagaggatctttttaagaataaagaccacttccagtttacaaacctgttcctctgtgggctgctgagcaaggcgaaacaaaagctgctgcggcacctcgttcctgctgccgccctgcgcagaaagcggaaagctctctgggcccatctgttctcctctcttagaggataccttaagagcctcccccgcgtgcaggtcgaatcctttaatcaggtgcaggctatgcctaccttcatctggatgctgcggtgcatctatgagacgcaatctcagaaagttggccagctggccgcgagagggatttgtgccaactaccttaagctgacatattgcaacgcttgtagcgccgattgctccgctctcagctttgtgctgcaccatttccccaaacgcctcgccctggaccttgataataacaatctgaacgactacggagtcagagaactccagccgtgtttttctcggctgaccgtgctgcgcctttccgtgaatcaaatcaccgatggcggggttaaggtcctgagcgaggagctcacaaagtataaaattgtgacctacctgggcctctggaagtctgtggacacaatctgcttcaaaaagcagggactgcttaaatga

SEQ ID NO: 9151 - protein, 953 aa, synthetic construct
  REGION 1..953: note = NOD1__Homo_sapiens__Q9Y239
MEEQGHSEMEIIPSESHPHIQLLKSNRELLVTHIRNTQCLVDNLLKNDYFSAEDAEIVCACPTQPDKVRKILDLVQSKGEEVSEFFLYLLQQLADAYVDLRPWLLEIGFSPSLLTQSKVVVNTDPVSRYTQQLRHHLGRDSKFVLCYAQKEELLLEEIYMDTIMELVGFSNESLGSLNSLACLLDHTTGILNEQGETIFILGDAGVGKSMLLQRLQSLWATGRLDAGVKFFFHFRCRMFSCFKESDRLCLQDLLFKHYCYPERDPEEVFAFLLRFPHVALFTFDGLDELHSDLDLSRVPDSSCPWEPAHPLVLLANLLSGKLLKGASKLLTARTGIEVPRQFLRKKVLLRGFSPSHLRAYARRMFPERALQDRLLSQLEANPNLCSLCSVPLFCWIIFRCFQHFRAAFEGSPQLPDCTMTLTDVFLLVTEVHLNRMQPSSLVQRNTRSPVETLHAGRDTLCSLGQVAHRGMEKSLFVFTQEEVQASGLQERDMQLGFLRALPELGPGGDQQSYEFFHLTLQAFFTAFFLVLDDRVGTQELLRFFQEWMPPAGAATTSCYPPFLPFQCLQGSGPAREDLFKNKDHFQFTNLFLCGLLSKAKQKLLRHLVPAAALRRKRKALWAHLFSSLRGYLKSLPRVQVESFNQVQAMPTFIWMLRCIYETQSQKVGQLAARGICANYLKLTYCNACSADCSALSFVLHHFPKRLALDLDNNNLNDYGVRELQPCFSRLTVLRLSVNQITDGGVKVLSEELTKYKIVTYLGLYNNQITDVGARYVTKILDECKGLTHLKLGKNKITSEGGKYLALAVKNSKSISEVGMWGNQVGDEGAKAFAEALRNHPSLTTLSLASNGISTEGGKSLARALQQNTSLEILWLTQNELNDEVAESLAEMLKVNQTLKHLWLIQNQITAKGTAQLADALQSNTGITEICLNGNLIKPEEAKVYEDEKRIICF

SEQ ID NO: 9152 - RNA, 2862 nt, synthetic construct
  misc_feature 1..2862: note = NOD1__Homo_sapiens__AAD28350
  source 1..2862: mol_type = other RNA
atggaagagcagggccacagtgagatggaaataatcccatcagagtctcacccccacattcaattactgaaaagcaatcgggaacttctggtcactcacatccgcaatactcagtgtctggtggacaacttgctgaagaatgactacttctcggccgaagatgcggagattgtgtgtgcctgccccacccagcctgacaaggtccgcaaaattctggacctggtacagagcaagggcgaggaggtgtccgagttcttcctctacttgctccagcaactcgcagatgcctacgtggacctcaggccttggctgctggagatcggcttctccccttccctgctcactcagagcaaagtcgtggtcaacactgacccagtgagcaggtatacccagcagctgcgacaccatctgggccgtgactccaagttcgtgctgtgctatgcccagaaggaggagctgctgctggaggagatctacatggacaccatcatggagctggttggcttcagcaatgagagcctgggcagcctgaacagcctggcctgcctcctggaccacaccaccggcatcctcaatgagcagggtgagaccatcttcatcctgggtgatgctggggtgggcaagtccatgctgctacagcggctgcagagcctctgggccacgggccggctagacgcaggggtcaaattcttcttccactttcgctgccgcatgttcagctgcttcaaggaaagtgacaggctgtgtctgcaggacctgctcttcaagcactactgctacccagagcgggaccccgaggaggtgtttgccttcctgctgcgcttcccccacgtggccctcttcaccttcgatggcctggacgagctgcactcggacttggacctgagccgcgtgcctgacagctcctgcccctgggagcctgcccaccccctggtcttgctggccaacctgctcagtgggaagctgctcaagggggctagcaagctgctcacagcccgcacaggcatcgaggtcccgcgccagttcctgcggaagaaggtgcttctccggggcttctcccccagccacctgcgcgcctatgccaggaggatgttccccgagcgggccctgcaggaccgcctgctgagccagctggaggccaaccccaacctctgcagcctgtgctctgtgcccctcttctgctggatcatcttccggtgcttccagcacttccgtgctgcctttgaaggctcaccacagctgcccgactgcacgatgaccctgacagatgtcttcctcctggtcactgaggtccatctgaacaggatgcagcccagcagcctggtgcagcggaacacacgcagcccagtggagaccctccacgccggccgggacactctgtgctcgctggggcaggtggcccaccggggcatggagaagagcctctttgtcttcacccaggaggaggtgcaggcctccgggctgcaggagagagacatgcagctgggcttcctgcgggctttgccggagctgggccccgggggtgaccagcagtcctatgagtttttccacctcaccctccaggccttctttacagccttcttcctcgtgctggacgacagggtgggcactcaggagctgctcaggttcttccaggagtggatgccccctgcgggggcagcgaccacgtcctgctatcctcccttcctcccgttccagtgcctgcagggcagtggtccggcgcgggaagacctcttcaagaacaaggatcacttccagttcaccaacctcttcctgtgcgggctgttgtccaaagccaaacagaaactcctgcggcatctggtgcccgcggcagccctgaggagaaagcgcaaggccctgtgggcacacctgttttccagcctgcggggctacctgaagagcctgccccgcgttcaggtcgaaagcttcaaccaggtgcaggccatgcccacgttcatctggatgctgcgctgcatctacgagacacagagccagaaggtggggcagctggcggccaggggcatctgcgccaactacctcaagctgacctactgcaacgcctgctcggccgactgcagcgccctctccttcgtcctgcatcacttccccaagcggctggccctagacctagacaacaacaatctcaacgactacggcgtgcgggagctgcagccctgcttcagccgcctcactgttctcagactcagcgtaaaccagatcactgacggtggggtaaaggtgctaagcgaagagctgaccaaatacaaaattgtgacctatttgggtttatacaacaaccagatcaccgatgtcggagccaggtacgtcaccaaaatcctggatgaatgcaaaggcctcacgcatcttaaactgggaaaaaacaaaataacaagtgaaggagggaagtatctcgccctggctgtgaagaacagcaaatcaatctctgaggttgggatgtggggcaatcaagttggggatgaaggagcaaaagccttcgcagaggctctgcggaaccaccccagcttgaccaccctgagtcttgcgtccaacggcatctccacagaaggaggaaagagccttgcgagggccctgcagcagaacacgtctctagaaatactgtggctgacccaaaatgaactcaacgatgaagtggcagagagtttggcagaaatgttgaaagtcaaccagacgttaaagcatttatggcttatccagaatcagatcacagctaaggggactgcccagctggcagatgcgttacagagcaacactggcataacagagatttgcctaaatggaaacctgataaaaccagaggaggccaaagtctatgaagatgagaagcggattatctgtttctga

SEQ ID NO: 9153 - RNA, 2862 nt, synthetic construct
  misc_feature 1..2862: note = derived and/or modified sequence opt1 fromNOD1__Homo_sapiens__AAD28350
  source 1..2862: mol_type = other RNA
atggaggagcagggccacagcgagatggagatcatcccctccgagagccacccgcacatccagctgctcaagtccaaccgcgagctgctggtgacccacatccggaacacccagtgcctcgtcgacaacctgctgaagaacgactacttcagcgccgaggacgccgagatcgtgtgcgcgtgccccacgcagcccgacaaggtgcgcaagatcctcgacctggtccagtccaagggggaggaggtgagcgagttcttcctgtacctcctgcagcagctggccgacgcctacgtggacctccggccctggctgctggagatcggcttctccccgagcctcctgacccagtccaaggtcgtggtgaacaccgaccccgtcagccgctacacccagcagctgcggcaccacctcgggcgcgactccaagttcgtgctgtgctacgcccagaaggaggagctgctcctggaggagatctacatggacacgatcatggagctggtgggcttcagcaacgagtccctcgggagcctgaactccctggcctgcctcctggaccacaccaccggcatcctgaacgagcagggcgagaccatcttcatcctcggggacgcgggcgtcggcaagagcatgctgctgcagcggctccagtccctgtgggccacggggcgcctggacgccggggtgaagttcttcttccacttccggtgccgcatgttcagctgcttcaaggagtccgaccggctctgcctgcaggacctgctgttcaagcactactgctaccccgagcgcgaccccgaggaggtgttcgccttcctgctgcggttcccgcacgtcgcgctgttcaccttcgacggcctggacgagctgcacagcgacctcgacctgagccgcgtgcccgactccagctgcccctgggagcccgcccacccgctggtgctcctggccaacctgctgtccggcaagctcctgaagggggccagcaagctgctcaccgcccggaccggcatcgaggtcccccgccagttcctgcggaagaaggtgctgctccgcgggttctcccccagccacctccgggcgtacgcccgccggatgttccccgagcgcgccctgcaggaccgcctcctgtcccagctggaggccaacccgaacctctgcagcctgtgctccgtgcccctgttctgctggatcatcttccggtgcttccagcacttccgcgccgcgttcgagggcagcccccagctccccgactgcacgatgaccctgaccgacgtcttcctgctcgtgaccgaggtgcacctgaaccggatgcagccgtccagcctggtccagcgcaacacgcggtcccccgtggagaccctccacgccggccgcgacaccctgtgcagcctggggcaggtcgcccaccggggcatggagaagtccctcttcgtgttcacccaggaggaggtgcaggccagcgggctgcaggagcgcgacatgcagctgggcttcctccgggccctgcccgagctggggcccggcggcgaccagcagtcctacgagttcttccacctcacgctgcaggcgttcttcaccgccttcttcctggtcctcgacgaccgcgtggggacccaggagctgctgcggttcttccaggagtggatgccgcccgccggcgccgccaccacgagctgctacccgcccttcctccccttccagtgcctgcaggggtccggccccgcgcgcgaggacctgttcaagaacaaggaccacttccagttcaccaacctcttcctgtgcgggctgctcagcaaggccaagcagaagctgctgcggcacctcgtgcccgccgccgcgctgcgccggaagcgcaaggccctgtgggcccacctcttcagctccctgcggggctacctcaagagcctcccgcgcgtccaggtggagtccttcaaccaggtgcaggccatgcccaccttcatctggatgctgcggtgcatctacgagacccagagccagaaggtcggccagctggccgcgcgcgggatctgcgccaactacctcaagctgacgtactgcaacgcctgctccgccgactgcagcgccctgtccttcgtgctccaccacttccccaagcgcctggcgctggacctcgacaacaacaacctgaacgactacggcgtgcgggagctgcagccctgcttcagccgcctcaccgtcctgcggctgtccgtgaaccagatcaccgacgggggcgtgaaggtcctcagcgaggagctgaccaagtacaagatcgtgacgtacctggggctctacaacaaccagatcaccgacgtgggcgcccgctacgtcaccaagatcctggacgagtgcaagggcctgacccacctcaagctggggaagaacaagatcacgtccgagggcgggaagtacctggccctcgccgtgaagaacagcaagtccatcagcgaggtgggcatgtggggcaaccaggtcggggacgagggcgccaaggcgttcgccgaggccctgcggaaccacccgtccctgaccaccctcagcctggcctccaacgggatcagcaccgagggcggcaagagcctggcgcgcgccctccagcagaacacctccctggagatcctgtggctcacgcagaacgagctgaacgacgaggtggccgagagcctggccgagatgctcaaggtgaaccagaccctgaagcacctgtggctcatccagaaccagatcaccgccaaggggaccgcgcagctggccgacgccctgcagtccaacacgggcatcaccgagatctgcctcaacgggaacctgatcaagcccgaggaggccaaggtctacgaggacgagaagcggatcatctgcttctga

SEQ ID NO: 9154 - RNA, 2862 nt, synthetic construct
  misc_feature 1..2862: note = derived and/or modified sequence opt2 fromNOD1__Homo_sapiens__AAD28350
  source 1..2862: mol_type = other RNA
atggaggagcagggccactccgagatggagatcatcccctccgagtcccacccccacatccagctcctcaagtccaaccgcgagctcctcgtcacccacatccgcaacacccagtgcctcgtcgacaacctcctcaagaacgactacttctccgccgaggacgccgagatcgtctgcgcctgccccacccagcccgacaaggtccgcaagatcctcgacctcgtccagtccaagggcgaggaggtctccgagttcttcctctacctcctccagcagctcgccgacgcctacgtcgacctccgcccctggctcctcgagatcggcttctccccctccctcctcacccagtccaaggtcgtcgtcaacaccgaccccgtctcccgctacacccagcagctccgccaccacctcggccgcgactccaagttcgtcctctgctacgcccagaaggaggagctcctcctcgaggagatctacatggacaccatcatggagctcgtcggcttctccaacgagtccctcggctccctcaactccctcgcctgcctcctcgaccacaccaccggcatcctcaacgagcagggcgagaccatcttcatcctcggcgacgccggcgtcggcaagtccatgctcctccagcgcctccagtccctctgggccaccggccgcctcgacgccggcgtcaagttcttcttccacttccgctgccgcatgttctcctgcttcaaggagtccgaccgcctctgcctccaggacctcctcttcaagcactactgctaccccgagcgcgaccccgaggaggtcttcgccttcctcctccgcttcccccacgtcgccctcttcaccttcgacggcctcgacgagctccactccgacctcgacctctcccgcgtccccgactcctcctgcccctgggagcccgcccaccccctcgtcctcctcgccaacctcctctccggcaagctcctcaagggcgcctccaagctcctcaccgcccgcaccggcatcgaggtcccccgccagttcctccgcaagaaggtcctcctccgcggcttctccccctcccacctccgcgcctacgcccgccgcatgttccccgagcgcgccctccaggaccgcctcctctcccagctcgaggccaaccccaacctctgctccctctgctccgtccccctcttctgctggatcatcttccgctgcttccagcacttccgcgccgccttcgagggctccccccagctccccgactgcaccatgaccctcaccgacgtcttcctcctcgtcaccgaggtccacctcaaccgcatgcagccctcctccctcgtccagcgcaacacccgctcccccgtcgagaccctccacgccggccgcgacaccctctgctccctcggccaggtcgcccaccgcggcatggagaagtccctcttcgtcttcacccaggaggaggtccaggcctccggcctccaggagcgcgacatgcagctcggcttcctccgcgccctccccgagctcggccccggcggcgaccagcagtcctacgagttcttccacctcaccctccaggccttcttcaccgccttcttcctcgtcctcgacgaccgcgtcggcacccaggagctcctccgcttcttccaggagtggatgccccccgccggcgccgccaccacctcctgctacccccccttcctccccttccagtgcctccagggctccggccccgcccgcgaggacctcttcaagaacaaggaccacttccagttcaccaacctcttcctctgcggcctcctctccaaggccaagcagaagctcctccgccacctcgtccccgccgccgccctccgccgcaagcgcaaggccctctgggcccacctcttctcctccctccgcggctacctcaagtccctcccccgcgtccaggtcgagtccttcaaccaggtccaggccatgcccaccttcatctggatgctccgctgcatctacgagacccagtcccagaaggtcggccagctcgccgcccgcggcatctgcgccaactacctcaagctcacctactgcaacgcctgctccgccgactgctccgccctctccttcgtcctccaccacttccccaagcgcctcgccctcgacctcgacaacaacaacctcaacgactacggcgtccgcgagctccagccctgcttctcccgcctcaccgtcctccgcctctccgtcaaccagatcaccgacggcggcgtcaaggtcctctccgaggagctcaccaagtacaagatcgtcacctacctcggcctctacaacaaccagatcaccgacgtcggcgcccgctacgtcaccaagatcctcgacgagtgcaagggcctcacccacctcaagctcggcaagaacaagatcacctccgagggcggcaagtacctcgccctcgccgtcaagaactccaagtccatctccgaggtcggcatgtggggcaaccaggtcggcgacgagggcgccaaggccttcgccgaggccctccgcaaccacccctccctcaccaccctctccctcgcctccaacggcatctccaccgagggcggcaagtccctcgcccgcgccctccagcagaacacctccctcgagatcctctggctcacccagaacgagctcaacgacgaggtcgccgagtccctcgccgagatgctcaaggtcaaccagaccctcaagcacctctggctcatccagaaccagatcaccgccaagggcaccgcccagctcgccgacgccctccagtccaacaccggcatcaccgagatctgcctcaacggcaacctcatcaagcccgaggaggccaaggtctacgaggacgagaagcgcatcatctgcttctga

SEQ ID NO: 9155 - RNA, 2862 nt, synthetic construct
  misc_feature 1..2862: note = derived and/or modified sequence opt3 fromNOD1__Homo_sapiens__AAD28350
  source 1..2862: mol_type = other RNA
atggaggaacagggccacagcgagatggaaatcattccctccgagtctcatcctcacatacaactgctcaagtcaaacagagaacttctggtgacccatatcaggaatacacagtgcttggtcgacaacttactgaaaaatgattacttcagtgccgaggacgctgagattgtttgtgcatgcccaactcagccggataaggtgcggaaaatcctagacctcgtacagagcaagggggaagaggtgtccgaatttttcctgtatcttctgcaacagttggccgatgcgtacgtcgacctccgcccctggctgctggagattggattttctccttcgctcttaacgcagtcaaaagtggttgtgaacaccgatccagtcagccgatatacacagcaactgcgtcaccatcttggtagagacagtaagttcgtgttgtgttacgctcagaaggaggaactgctactcgaggaaatctatatggatactataatggagctggtaggcttttccaatgaatctcttgggagcctgaactccttggcctgcctcctggaccacaccacaggaatcttaaatgagcagggcgagaccattttcatcctgggtgatgcaggggttggaaaatcaatgctccttcagaggctgcaaagtttgtgggccactggccggctagacgctggcgtgaagtttttctttcacttccgctgtagaatgtttagctgcttcaaagaatctgataggctgtgtctccaggacctgctttttaagcattactgctatcccgagcgggaccctgaagaggtcttcgcattcctgttgcgctttccacacgtggccctcttcacatttgatgggctggacgaattacattccgatctggacctatcacgagtgcccgatagcagttgtccttgggagccagctcacccgctcgtcctgcttgccaacttgctgtctggaaaactcctgaagggtgcgtccaaacttctgaccgcaagaacgggcattgaggttcccaggcagttcttgcggaaaaaggtgctcctgcgtgggtttagcccttcgcacttacgcgcctacgctagaaggatgttcccagaacgggccctgcaagaccgactactctctcagctggaggcaaatcccaacctttgctccttgtgttcagtacctctgttttgctggatcatattccgctgctttcagcatttcagagctgcctttgaaggaagtccacagctccccgattgtactatgaccctgacagacgtgttcttactggtcactgaggtgcaccttaataggatgcaaccgagctccttggttcagcggaacacccgctctcctgtggaaacactccatgcgggcagagataccctgtgcagcctaggtcaggtcgcccacagggggatggagaaatcactgtttgtgttcacgcaggaggaagtacaagcaagtggactccaggagcgtgacatgcagctgggcttccttcgggctttgcccgaactgggcccagggggagatcagcaatcctacgagtttttccatttaactctccaggcctttttcacagcctttttcctggttcttgacgaccgagtgggtacccaggagctgttgagatttttccaggaatggatgcctcccgctggcgcagccactacaagctgttatccaccctttctccctttccaatgcctgcaggggtctggaccagctagggaggatctatttaagaataaagaccacttccagtttaccaacctgttcctctgtggcctgctttcaaaggcgaaacaaaagttgctgcgccacttagtcccggcagccgctctccggagaaagaggaaagccctgtgggcacatcttttcagtagcctgcgcggttacctaaagtccctcccccgagtgcaggtcgaatcttttaatcaggtgcaggccatgcctacgttcatttggatgctgcggtgcatctatgagacccaatcgcagaaagttgggcagttggctgcccgtggcatttgtgcaaactacctgaagttaacatattgcaacgcgtgtagcgctgattgctccgccctctcatttgtgctgcaccatttcccaaaaagacttgcactggacttggataataacaatctcaacgactacggagtaagggaactgcagccctgttttagtcgcctaactgtcctgcggctttctgtgaatcaaatcaccgatggcggggttaaggtgctcagcgaggagctgacaaagtataaaatcgtcacttacttgggactgtacaacaatcagattaccgacgtgggtgccagatatgtaacaaagatattagatgaatgcaaaggcctcacccacctgaaacttgggaagaacaagatcacttccgagggaggcaagtacctggctttggccgtgaaaaattcaaagagcatttctgaagttggtatgtgggggaaccaggtcggcgacgagggagcaaaggctttcgccgaagcgctcaggaatcacccttccctgacgacactaagtctggccagcaacggcatctctaccgaagggggaaagtcccttgctcgagcactccagcaaaatacttcactggagatattgtggttaacccagaacgagctgaatgatgaggtggccgaaagtctcgctgagatgctgaaagtgaaccagacacttaagcatctgtggttgattcaaaaccagatcaccgccaagggtactgcacagctagcggacgccctgcagagcaatacaggcatcacggaaatttgcctcaacgggaatctgatcaaaccagaggaggctaaggtctatgaagatgagaaacgcattatatgtttttga

SEQ ID NO: 9156 - RNA, 2862 nt, synthetic construct
  misc_feature 1..2862: note = derived and/or modified sequence opt4 fromNOD1__Homo_sapiens__AAD28350
  source 1..2862: mol_type = other RNA
atggaggagcagggccacagcgagatggagatcatccccagcgagagccacccccacatccagctgctgaagagcaacagagagctgctggtgacccacatcagaaacacccagtgcctggtggacaacctgctgaagaacgactacttcagcgccgaggacgccgagatcgtgtgcgcctgccccacccagcccgacaaggtgagaaagatcctggacctggtgcagagcaagggcgaggaggtgagcgagttcttcctgtacctgctgcagcagctggccgacgcctacgtggacctgagaccctggctgctggagatcggcttcagccccagcctgctgacccagagcaaggtggtggtgaacaccgaccccgtgagcagatacacccagcagctgagacaccacctgggcagagacagcaagttcgtgctgtgctacgcccagaaggaggagctgctgctggaggagatctacatggacaccatcatggagctggtgggcttcagcaacgagagcctgggcagcctgaacagcctggcctgcctgctggaccacaccaccggcatcctgaacgagcagggcgagaccatcttcatcctgggcgacgccggcgtgggcaagagcatgctgctgcagagactgcagagcctgtgggccaccggcagactggacgccggcgtgaagttcttcttccacttcagatgcagaatgttcagctgcttcaaggagagcgacagactgtgcctgcaggacctgctgttcaagcactactgctaccccgagagagaccccgaggaggtgttcgccttcctgctgagattcccccacgtggccctgttcaccttcgacggcctggacgagctgcacagcgacctggacctgagcagagtgcccgacagcagctgcccctgggagcccgcccaccccctggtgctgctggccaacctgctgagcggcaagctgctgaagggcgccagcaagctgctgaccgccagaaccggcatcgaggtgcccagacagttcctgagaaagaaggtgctgctgagaggcttcagccccagccacctgagagcctacgccagaagaatgttccccgagagagccctgcaggacagactgctgagccagctggaggccaaccccaacctgtgcagcctgtgcagcgtgcccctgttctgctggatcatcttcagatgcttccagcacttcagagccgccttcgagggcagcccccagctgcccgactgcaccatgaccctgaccgacgtgttcctgctggtgaccgaggtgcacctgaacagaatgcagcccagcagcctggtgcagagaaacaccagaagccccgtggagaccctgcacgccggcagagacaccctgtgcagcctgggccaggtggcccacagaggcatggagaagagcctgttcgtgttcacccaggaggaggtgcaggccagcggcctgcaggagagagacatgcagctgggcttcctgagagccctgcccgagctgggccccggcggcgaccagcagagctacgagttcttccacctgaccctgcaggccttcttcaccgccttcttcctggtgctggacgacagagtgggcacccaggagctgctgagattcttccaggagtggatgccccccgccggcgccgccaccaccagctgctacccccccttcctgcccttccagtgcctgcagggcagcggccccgccagagaggacctgttcaagaacaaggaccacttccagttcaccaacctgttcctgtgcggcctgctgagcaaggccaagcagaagctgctgagacacctggtgcccgccgccgccctgagaagaaagagaaaggccctgtgggcccacctgttcagcagcctgagaggctacctgaagagcctgcccagagtgcaggtggagagcttcaaccaggtgcaggccatgcccaccttcatctggatgctgagatgcatctacgagacccagagccagaaggtgggccagctggccgccagaggcatctgcgccaactacctgaagctgacctactgcaacgcctgcagcgccgactgcagcgccctgagcttcgtgctgcaccacttccccaagagactggccctggacctggacaacaacaacctgaacgactacggcgtgagagagctgcagccctgcttcagcagactgaccgtgctgagactgagcgtgaaccagatcaccgacggcggcgtgaaggtgctgagcgaggagctgaccaagtacaagatcgtgacctacctgggcctgtacaacaaccagatcaccgacgtgggcgccagatacgtgaccaagatcctggacgagtgcaagggcctgacccacctgaagctgggcaagaacaagatcaccagcgagggcggcaagtacctggccctggccgtgaagaacagcaagagcatcagcgaggtgggcatgtggggcaaccaggtgggcgacgagggcgccaaggccttcgccgaggccctgagaaaccaccccagcctgaccaccctgagcctggccagcaacggcatcagcaccgagggcggcaagagcctggccagagccctgcagcagaacaccagcctggagatcctgtggctgacccagaacgagctgaacgacgaggtggccgagagcctggccgagatgctgaaggtgaaccagaccctgaagcacctgtggctgatccagaaccagatcaccgccaagggcaccgcccagctggccgacgccctgcagagcaacaccggcatcaccgagatctgcctgaacggcaacctgatcaagcccgaggaggccaaggtgtacgaggacgagaagagaatcatctgcttctga

SEQ ID NO: 9157 - RNA, 2862 nt, synthetic construct
  misc_feature 1..2862: note = derived and/or modified sequence opt5 fromNOD1__Homo_sapiens__AAD28350
  source 1..2862: mol_type = other RNA
atggaggaacagggccacagcgagatggaaatcattccctccgagtctcatcctcacatccaactgctcaagagcaacagagaactgcttgtgacccatattcggaatacacagtgcctggtcgacaacctcctgaaaaatgattacttctccgccgaggacgctgagatcgtttgtgcctgcccgacgcagcccgataaggtgcgcaaaattcttgacctggtgcagtctaagggggaagaggtcagcgaatttttcctctatctgctgcaacagctcgcggatgcttacgtggacctgagaccttggcttctggagatcggattttccccctctctcctgacccagagcaaagttgtggtcaacacagatcctgtgtcccggtatacccagcaacttcgccaccatctgggcagagacagcaagttcgttctctgttacgcccagaaggaggaactgctgctcgaggaaatctatatggatacaattatggagctggtggggttttctaatgaatcccttggaagcctgaactctctcgcctgcctgcttgaccacaccacaggcatcctgaatgagcagggggagaccattttcatcctcggagatgctggcgtcggcaaatccatgctgctgcagcggctccaaagcctgtgggccacggggcgccttgacgctggagtgaagtttttctttcacttcagatgtcggatgttttcttgcttcaaagaatccgatcgcctgtgtctccaggacctgctttttaagcattactgctatcccgagagagaccctgaagaggtgttcgccttcctgctccggtttccgcacgtcgcgctgttcacctttgatggcctggacgaactccatagcgatctggacctttcccgcgttcccgattctagctgtccttgggagcccgcccaccctctggtgctcctggctaacctgctttccgggaaactcctgaagggagccagcaagctgctcacagctagaaccggcattgaggtgccccggcagttcctgcgcaaaaaggtccttctgagagggttttctccgtcccacctccgggcctacgcgagacgcatgttccctgaacgggccctgcaagacagactgcttagccagctcgaggctaatcccaacctgtgctctctgtgtagcgtgcctctcttttgctggatcattttccgctgctttcagcatttccgggccgcttttgaaggaagcccccagctgcccgattgtacaatgacccttacggacgttttcctgctcgtgacagaggtccacctgaatagaatgcaaccttctagcctggtgcagcgcaacacccggtccccggttgaaacacttcatgccggcagagataccctctgcagcctgggccaggtggcccaccgcgggatggagaaatctctgtttgtcttcacccaggaggaagtgcaggcttccggactccaagagcgggacatgcagctgggcttccttagagcgctgcccgaactcgggcctggaggcgatcagcaaagctacgagtttttccatctgacactgcaggcctttttcacggcctttttccttgtcctcgacgaccgcgtggggacccaggagctgctgcggtttttccaggaatggatgccccctgctggagccgctacaacctcttgttatcccccgtttctccctttccaatgcctgcagggctccggccccgccagagaggatctttttaagaataaagaccacttccagtttacaaacctgttcctctgtgggctgctgagcaaggcgaaacaaaaacttctgcggcacctcgttcctgctgccgccctgcgcagaaagcggaaagctctctgggcccatctgttctcctctcttagaggatacctgaagtccctcccccgcgtgcaggtcgaatcctttaatcaggtgcaggctatgcctaccttcatctggatgctgcggtgcatctatgagacgcaatctcagaaagttggccagctggccgcgagagggatttgtgccaactaccttaagctgacatattgcaacgcttgtagcgccgattgctccgctctcagctttgtgctgcaccatttccccaaacgcctcgccctggaccttgataataacaatctgaacgactacggagtcagagaactccagccgtgtttttctcggctgaccgtgctgcgcctttccgtgaatcaaatcaccgatggcggggttaaggtcctgagcgaggagctcacaaagtataaaattgtgacctacctgggcctctacaacaatcagatcacagacgtgggagcgagatatgtcacgaagattctggatgaatgcaaaggccttacccacctgaagctggggaaaaacaagatcacatctgagggaggcaagtacctcgccctggctgtgaaaaattccaagagcatctctgaagttgggatgtggggaaaccaggtgggcgacgagggggccaaggctttcgccgaagcccttcggaatcaccctagcctgaccacactctccctggctagcaacggcatttctaccgagggaggcaagtccctcgcgcgcgccctgcagcaaaatacgagccttgagatcctgtggctgacccagaacgaactcaatgatgaggtcgctgaatccctggccgagatgcttaaagtgaaccagacactgaagcatctctggctgattcaaaaccagatcaccgccaaggggacagctcagctcgccgacgcgctgcagtctaataccggaattacggaaatctgccttaacggcaatctgatcaaacccgaggaggctaaggtttatgaagatgagaaaagaattatctgtttttga

SEQ ID NO: 9158 - protein, 1040 aa, synthetic construct
  REGION 1..1040: note = NOD2__Homo_sapiens__Q9HC29
MGEEGGSASHDEEERASVLLGHSPGCEMCSQEAFQAQRSQLVELLVSGSLEGFESVLDWLLSWEVLSWEDYEGFHLLGQPLSHLARRLLDTVWNKGTWACQKLIAAAQEAQADSQSPKLHGCWDPHSLHPARDLQSHRPAIVRRLHSHVENMLDLAWERGFVSQYECDEIRLPIFTPSQRARRLLDLATVKANGLAAFLLQHVQELPVPLALPLEAATCKKYMAKLRTTVSAQSRFLSTYDGAETLCLEDIYTENVLEVWADVGMAGPPQKSPATLGLEELFSTPGHLNDDADTVLVVGEAGSGKSTLLQRLHLLWAAGQDFQEFLFVFPFSCRQLQCMAKPLSVRTLLFEHCCWPDVGQEDIFQLLLDHPDRVLLTFDGFDEFKFRFTDRERHCSPTDPTSVQTLLFNLLQGNLLKNARKVVTSRPAAVSAFLRKYIRTEFNLKGFSEQGIELYLRKRHHEPGVADRLIRLLQETSALHGLCHLPVFSWMVSKCHQELLLQEGGSPKTTTDMYLLILQHFLLHATPPDSASQGLGPSLLRGRLPTLLHLGRLALWGLGMCCYVFSAQQLQAAQVSPDDISLGFLVRAKGVVPGSTAPLEFLHITFQCFFAAFYLALSADVPPALLRHLFNCGRPGNSPMARLLPTMCIQASEGKDSSVAALLQKAEPHNLQITAAFLAGLLSREHWGLLAECQTSEKALLRRQACARWCLARSLRKHFHSIPPAAPGEAKSVHAMPGFIWLIRSLYEMQEERLARKAARGLNVGHLKLTFCSVGPTECAALAFVLQHLRRPVALQLDYNSVGDIGVEQLLPCLGVCKALYLRDNNISDRGICKLIECALHCEQLQKLALFNNKLTDGCAHSMAKLLACRQNFLALRLGNNYITAAGAQVLAEGLRGNTSLQFLGFWGNRVGDEGAQALAEALGDHQSLRWLSLVGNNIGSVGAQALALMLAKNVMLEELCLEENHLQDEGVCSLAEGLKKNSSLKILKLSNNCITYLGAEALLQALERNDTILEVWLRGNTFSLEEVDKLGCRDTRLLL

SEQ ID NO: 9159 - RNA, 3123 nt, synthetic construct
  misc_feature 1..3123: note = NOD2__Homo_sapiens__AAG33677
  source 1..3123: mol_type = other RNA
atgggggaagagggtggttcagcctctcacgatgaggaggaaagagcaagtgtcctcctcggacattctccgggttgtgaaatgtgctcgcaggaggcttttcaggcacagaggagccagctggtcgagctgctggtctcagggtccctggaaggcttcgagagtgtcctggactggctgctgtcctgggaggtcctctcctgggaggactacgagggcttccacctcctgggccagcctctctcccacttggccaggcgccttctggacaccgtctggaataagggtacttgggcctgtcagaagctcatcgcggctgcccaagaagcccaggccgacagccagtcccccaagctgcatggctgctgggacccccactcgctccacccagcccgagacctgcagagtcaccggccagccattgtcaggaggctccacagccatgtggagaacatgctggacctggcatgggagcggggtttcgtcagccagtatgaatgtgatgaaatcaggttgccgatcttcacaccgtcccagagggcaagaaggctgcttgatcttgccacggtgaaagcgaatggattggctgccttccttctacaacatgttcaggaattaccagtcccattggccctgcctttggaagctgccacatgcaagaagtatatggccaagctgaggaccacggtgtctgctcagtctcgcttcctcagtacctatgatggagcagagacgctctgcctggaggacatatacacagagaatgtcctggaggtctgggcagatgtgggcatggctggacccccgcagaagagcccagccaccctgggcctggaggagctcttcagcacccctggccacctcaatgacgatgcggacactgtgctggtggtgggtgaggcgggcagtggcaagagcacgctcctgcagcggctgcacttgctgtgggctgcagggcaagacttccaggaatttctctttgtcttcccattcagctgccggcagctgcagtgcatggccaaaccactctctgtgcggactctactctttgagcactgctgttggcctgatgttggtcaagaagacatcttccagttactccttgaccaccctgaccgtgtcctgttaacctttgatggctttgacgagttcaagttcaggttcacggatcgtgaacgccactgctccccgaccgaccccacctctgtccagaccctgctcttcaaccttctgcagggcaacctgctgaagaatgcccgcaaggtggtgaccagccgtccggccgctgtgtcggcgttcctcaggaagtacatccgcaccgagttcaacctcaagggcttctctgaacagggcatcgagctgtacctgaggaagcgccatcatgagcccggggtggcggaccgcctcatccgcctgctccaagagacctcagccctgcacggtttgtgccacctgcctgtcttctcatggatggtgtccaaatgccaccaggaactgttgctgcaggagggggggtccccaaagaccactacagatatgtacctgctgattctgcagcattttctgctgcatgccacccccccagactcagcttcccaaggtctgggacccagtcttcttcggggccgcctccccaccctcctgcacctgggcagactggctctgtggggcctgggcatgtgctgctacgtgttctcagcccagcagctccaggcagcacaggtcagccctgatgacatttctcttggcttcctggtgcgtgccaaaggtgtcgtgccagggagtacggcgcccctggaattccttcacatcactttccagtgcttctttgccgcgttctacctggcactcagtgctgatgtgccaccagctttgctcagacacctcttcaattgtggcaggccaggcaactcaccaatggccaggctcctgcccacgatgtgcatccaggcctcggagggaaaggacagcagcgtggcagctttgctgcagaaggccgagccgcacaaccttcagatcacagcagccttcctggcagggctgttgtcccgggagcactggggcctgctggctgagtgccagacatctgagaaggccctgctccggcgccaggcctgtgcccgctggtgtctggcccgcagcctccgcaagcacttccactccatcccgccagctgcaccgggtgaggccaagagcgtgcatgccatgcccgggttcatctggctcatccggagcctgtacgagatgcaggaggagcggctggctcggaaggctgcacgtggcctgaatgttgggcacctcaagttgacattttgcagtgtgggccccactgagtgtgctgccctggcctttgtgctgcagcacctccggcggcccgtggccctgcagctggactacaactctgtgggtgacattggcgtggagcagctgctgccttgccttggtgtctgcaaggctctgtatttgcgcgataacaatatctcagaccgaggcatctgcaagctcattgaatgtgctcttcactgcgagcaattgcagaagttagctctattcaacaacaaattgactgacggctgtgcacactccatggctaagctccttgcatgcaggcagaacttcttggcattgaggctggggaataactacatcactgccgcgggagcccaagtgctggccgaggggctccgaggcaacacctccttgcagttcctgggattctggggcaacagagtgggtgacgagggggcccaggccctggctgaagccttgggtgatcaccagagcttgaggtggctcagcctggtggggaacaacattggcagtgtgggtgcccaagccttggcactgatgctggcaaagaacgtcatgctagaagaactctgcctggaggagaaccatctccaggatgaaggtgtatgttctctcgcagaaggactgaagaaaaattcaagtttgaaaatcctgaagttgtccaataactgcatcacctacctaggggcagaagccctcctgcaggcccttgaaaggaatgacaccatcctggaagtctggctccgagggaacactttctctctagaggaggttgacaagctcggctgcagggacaccagactcttgctttga

SEQ ID NO: 9160 - RNA, 3123 nt, synthetic construct
  misc_feature 1..3123: note = derived and/or modified sequence opt1 fromNOD2__Homo_sapiens__AAG33677
  source 1..3123: mol_type = other RNA
atgggcgaggagggcgggagcgcctcccacgacgaggaggagcgcgccagcgtgctgctcgggcactcccccggctgcgagatgtgcagccaggaggcgttccaggcccagcggtcccagctggtcgagctgctcgtgagcgggtccctggagggcttcgagagcgtgctggactggctcctgtcctgggaggtcctgagctgggaggactacgagggcttccacctcctggggcagccgctgtcccacctcgcccgccggctgctggacaccgtgtggaacaagggcacctgggcctgccagaagctcatcgccgcggcccaggaggcccaggccgacagccagtcccccaagctgcacgggtgctgggacccccacagcctgcaccccgcgcgcgacctccagtcccaccggccggccatcgtgcgccggctgcacagccacgtcgagaacatgctggacctcgcctgggagcgcggcttcgtgtcccagtacgagtgcgacgagatccggctgcccatcttcacgcccagccagcgcgcccggcgcctgctcgacctggccaccgtgaaggcgaacgggctggccgccttcctcctgcagcacgtccaggagctgcccgtgccgctcgccctgcccctggaggccgcgacctgcaagaagtacatggccaagctccggaccacggtgtccgcccagagccgcttcctgagcacctacgacggcgccgagaccctgtgcctcgaggacatctacaccgagaacgtcctggaggtgtgggccgacgtgggcatggcggggccgccccagaagtcccccgccacgctgggcctcgaggagctgttcagcacccccgggcacctgaacgacgacgccgacaccgtcctcgtggtgggcgaggccggctccggcaagagcaccctgctgcagcggctccacctcctgtgggccgcggggcaggacttccaggagttcctcttcgtcttccccttctcctgccgccagctgcagtgcatggccaagcccctgagcgtgcggacgctgctgttcgagcactgctgctggccggacgtggggcaggaggacatcttccagctgctgctcgaccaccccgaccgcgtcctgctgaccttcgacggcttcgacgagttcaagttccggttcaccgaccgcgagcggcactgctcccccaccgaccccacgagcgtgcagaccctcctgttcaacctgctccaggggaacctgctgaagaacgcccgcaaggtggtcacctcccgcccggccgcggtgagcgccttcctccggaagtacatccgcaccgagttcaacctgaagggcttctccgagcagggcatcgagctgtacctccggaagcgccaccacgagcccggggtcgccgaccggctgatccgcctgctccaggagacgagcgccctgcacggcctgtgccacctccccgtgttctcctggatggtgagcaagtgccaccaggagctgctgctccaggagggcgggtcccccaagaccaccaccgacatgtacctgctgatcctccagcacttcctgctgcacgccacgccgcccgacagcgcgtcccaggggctcggccccagcctgctgcggggccgcctccccaccctgctgcacctcgggcggctggccctgtggggcctcgggatgtgctgctacgtcttctccgcccagcagctgcaggccgcccaggtgagcccggacgacatcagcctgggcttcctcgtgcgcgcgaagggggtcgtgcccggctccaccgcgcccctggagttcctgcacatcaccttccagtgcttcttcgccgccttctacctcgccctgagcgcggacgtgccgcccgccctgctccggcacctgttcaactgcggccgccccgggaactcccccatggcccggctgctcccgacgatgtgcatccaggccagcgagggcaaggactccagcgtcgcggccctgctgcagaaggccgagccccacaacctccagatcaccgccgccttcctggcggggctgctctcccgcgagcactggggcctgctggccgagtgccagaccagcgagaaggccctcctgcggcgccaggcctgcgcccggtggtgcctggcgcgctccctccggaagcacttccacagcatcccgcccgccgcccccggcgaggccaagtccgtgcacgccatgcccgggttcatctggctgatccgcagcctgtacgagatgcaggaggagcgcctcgcgcggaaggccgcccgcggcctgaacgtggggcacctgaagctcaccttctgctccgtcggccccacggagtgcgccgcgctggccttcgtgctgcagcacctccggcgccccgtggccctgcagctggactacaacagcgtcggggacatcggcgtggagcagctcctgccgtgcctgggcgtgtgcaaggccctctacctgcgggacaacaacatctccgaccgcgggatctgcaagctgatcgagtgcgccctccactgcgagcagctgcagaagctggccctcttcaacaacaagctgaccgacggctgcgcccacagcatggccaagctgctcgcctgccggcagaacttcctggccctgcgcctcgggaacaactacatcaccgcggccggcgcccaggtcctggccgaggggctgcggggcaacacctccctccagttcctgggcttctgggggaaccgcgtgggcgacgagggggcccaggcgctggccgaggccctgggcgaccaccagagcctccggtggctgagcctggtggggaacaacatcggctccgtcggcgcccaggccctcgcgctgatgctggccaagaacgtgatgctcgaggagctgtgcctggaggagaaccacctccaggacgagggggtgtgcagcctggccgagggcctgaagaagaactccagcctcaagatcctgaagctgtccaacaactgcatcacgtacctcggggccgaggcgctgctgcaggccctcgagcgcaacgacaccatcctggaggtctggctgcggggcaacaccttcagcctcgaggaggtggacaagctggggtgccgcgacacccggctgctcctgtga

SEQ ID NO: 9161 - RNA, 3123 nt, synthetic construct
  misc_feature 1..3123: note = derived and/or modified sequence opt2 fromNOD2__Homo_sapiens__AAG33677
  source 1..3123: mol_type = other RNA
atgggcgaggagggcggctccgcctcccacgacgaggaggagcgcgcctccgtcctcctcggccactcccccggctgcgagatgtgctcccaggaggccttccaggcccagcgctcccagctcgtcgagctcctcgtctccggctccctcgagggcttcgagtccgtcctcgactggctcctctcctgggaggtcctctcctgggaggactacgagggcttccacctcctcggccagcccctctcccacctcgcccgccgcctcctcgacaccgtctggaacaagggcacctgggcctgccagaagctcatcgccgccgcccaggaggcccaggccgactcccagtcccccaagctccacggctgctgggacccccactccctccaccccgcccgcgacctccagtcccaccgccccgccatcgtccgccgcctccactcccacgtcgagaacatgctcgacctcgcctgggagcgcggcttcgtctcccagtacgagtgcgacgagatccgcctccccatcttcaccccctcccagcgcgcccgccgcctcctcgacctcgccaccgtcaaggccaacggcctcgccgccttcctcctccagcacgtccaggagctccccgtccccctcgccctccccctcgaggccgccacctgcaagaagtacatggccaagctccgcaccaccgtctccgcccagtcccgcttcctctccacctacgacggcgccgagaccctctgcctcgaggacatctacaccgagaacgtcctcgaggtctgggccgacgtcggcatggccggccccccccagaagtcccccgccaccctcggcctcgaggagctcttctccacccccggccacctcaacgacgacgccgacaccgtcctcgtcgtcggcgaggccggctccggcaagtccaccctcctccagcgcctccacctcctctgggccgccggccaggacttccaggagttcctcttcgtcttccccttctcctgccgccagctccagtgcatggccaagcccctctccgtccgcaccctcctcttcgagcactgctgctggcccgacgtcggccaggaggacatcttccagctcctcctcgaccaccccgaccgcgtcctcctcaccttcgacggcttcgacgagttcaagttccgcttcaccgaccgcgagcgccactgctcccccaccgaccccacctccgtccagaccctcctcttcaacctcctccagggcaacctcctcaagaacgcccgcaaggtcgtcacctcccgccccgccgccgtctccgccttcctccgcaagtacatccgcaccgagttcaacctcaagggcttctccgagcagggcatcgagctctacctccgcaagcgccaccacgagcccggcgtcgccgaccgcctcatccgcctcctccaggagacctccgccctccacggcctctgccacctccccgtcttctcctggatggtctccaagtgccaccaggagctcctcctccaggagggcggctcccccaagaccaccaccgacatgtacctcctcatcctccagcacttcctcctccacgccaccccccccgactccgcctcccagggcctcggcccctccctcctccgcggccgcctccccaccctcctccacctcggccgcctcgccctctggggcctcggcatgtgctgctacgtcttctccgcccagcagctccaggccgcccaggtctcccccgacgacatctccctcggcttcctcgtccgcgccaagggcgtcgtccccggctccaccgcccccctcgagttcctccacatcaccttccagtgcttcttcgccgccttctacctcgccctctccgccgacgtcccccccgccctcctccgccacctcttcaactgcggccgccccggcaactcccccatggcccgcctcctccccaccatgtgcatccaggcctccgagggcaaggactcctccgtcgccgccctcctccagaaggccgagccccacaacctccagatcaccgccgccttcctcgccggcctcctctcccgcgagcactggggcctcctcgccgagtgccagacctccgagaaggccctcctccgccgccaggcctgcgcccgctggtgcctcgcccgctccctccgcaagcacttccactccatcccccccgccgcccccggcgaggccaagtccgtccacgccatgcccggcttcatctggctcatccgctccctctacgagatgcaggaggagcgcctcgcccgcaaggccgcccgcggcctcaacgtcggccacctcaagctcaccttctgctccgtcggccccaccgagtgcgccgccctcgccttcgtcctccagcacctccgccgccccgtcgccctccagctcgactacaactccgtcggcgacatcggcgtcgagcagctcctcccctgcctcggcgtctgcaaggccctctacctccgcgacaacaacatctccgaccgcggcatctgcaagctcatcgagtgcgccctccactgcgagcagctccagaagctcgccctcttcaacaacaagctcaccgacggctgcgcccactccatggccaagctcctcgcctgccgccagaacttcctcgccctccgcctcggcaacaactacatcaccgccgccggcgcccaggtcctcgccgagggcctccgcggcaacacctccctccagttcctcggcttctggggcaaccgcgtcggcgacgagggcgcccaggccctcgccgaggccctcggcgaccaccagtccctccgctggctctccctcgtcggcaacaacatcggctccgtcggcgcccaggccctcgccctcatgctcgccaagaacgtcatgctcgaggagctctgcctcgaggagaaccacctccaggacgagggcgtctgctccctcgccgagggcctcaagaagaactcctccctcaagatcctcaagctctccaacaactgcatcacctacctcggcgccgaggccctcctccaggccctcgagcgcaacgacaccatcctcgaggtctggctccgcggcaacaccttctccctcgaggaggtcgacaagctcggctgccgcgacacccgcctcctcctctga

SEQ ID NO: 9162 - RNA, 3123 nt, synthetic construct
  misc_feature 1..3123: note = derived and/or modified sequence opt3 fromNOD2__Homo_sapiens__AAG33677
  source 1..3123: mol_type = other RNA
atgggcgaggaagggggaagcgcctcccacgacgaggaagagagagcttctgtgctgctcggtcattcacccggctgcgaaatgtgtagtcaggaggcattccaagcccagaggagccagcttgtcgagctgttggtttccgggtctttagaaggatttgagtcggtgctggattggctactctcatgggaagtactgagctgggaggactacgagggcttccaccttctgggtcagcctttgagtcatctcgcgcggcgcctgctggataccgtgtggaacaaggggacatgggcttgccaaaaactcatcgccgcagcccaggaagctcaggcagactcccagtctccaaagttacacggatgttgggatccgcatagcctgcaccccgcccgagaccttcaatcccaccgtcctgctattgtcagaaggttgcattcacacgtggagaatatgctggatctagcctgggaacggggctttgttagtcagtatgagtgcgacgaaatacgcctcccaatcttcactcccagccagagagcgaggcggctgcttgatctggcaacggtgaaagccaacggcttggctgcctttctcctgcagcatgtccaagagttacctgtgccactggcactcccccttgaggctgccacctgtaagaaatacatggcgaagctgcgcacaactgtatctgcccagtcccgattcttgtcaacctatgacggggcagaaacactatgcctggaggatatttacaccgaaaatgttctcgaggtgtgggctgacgtcggaatggccggtcctccacagaagtctccggctactctgggccttgaggagctgtttagtacacccgggcacttgaacgatgacgccgacaccgtgctcgtggtcggagaggcaggctctggtaaatccacgctgttacaaagactgcacctactctgggccgctgggcaggatttccaggaatttctgttcgtttttcctttcagctgtaggcagcttcaatgcatggcgaagccattgtcggtgcggactctgctctttgagcattgttgctggcccgacgtaggacaggaagatatcttccagctgcttctggaccaccctgatcgtgtgttgctcaccttcgacggctttgatgagttcaaatttcgcttcacagacagagaaaggcattgttctccaactgatcccacctccgtccagacactgttatttaatctgctacaaggcaacctcctgaagaatgcacggaaagtggttacctcacgaccggccgctgtgagtgccttccttcgcaagtatattagaacggagtttaacttgaaggggttcagcgagcagggaatcgaactgtacctcaggaaacggcaccatgagcctggtgtcgcagaccgcctgataagattactgcaggaaacttccgcccttcacggcttgtgccacctccccgtgttttcttggatggtaagcaagtgccatcaggagctgctactgcaagaagggggatcaccaaaaacaaccactgatatgtatctcctgatccttcagcacttcttgctgcatgctacacctcccgacagtgcctcccagggcttaggtccaagcctcctgagggggcgtcttcccaccctgttgcacctcggccggctggcactatggggactgggcatgtgttgctacgtttttagcgcgcagcaactccaggctgcccaggtgtcacctgacgatattagtctggggttccttgtccgagcaaagggagtggtcccaggtagcacggccccgttggaatttctgcacatcaccttccaatgtttctttgctgccttctacttagcactctccgctgacgtgccccctgccctgcttagacatctgtttaattgcggcaggccagggaactctcccatggcgcgcctactccctacaatgtgtattcaggcctcggagggaaaagatagctccgttgctgcactgttgcagaaggccgaaccacacaatctgcagatcactgctgccttcttagcaggcctcctgtcacgggagcattggggtcttctggcggaatgccaaaccagtgagaaagccttgctcagaaggcaggcttgtgcccgctggtgcctggcacgatctctacggaagcactttcatagcatacccccggctgcccctggggaggcaaagtccgtgcacgccatgccaggcttcatttggctgatccgttcactttatgaaatgcaggaggaaagactcgctaggaaagcggcccgcggactgaacgtaggccacttgaagctgacattttgtagcgtcgggcccactgagtgcgcagctttagccttcgtgctccagcatctgcggagacctgttgcccttcaactggactacaattctgtgggagatattggtgtcgaacagttgctcccctgtctgggcgtgtgcaaagctctatatctgagggacaacaatatctccgatcgagggatctgcaaacttattgagtgtgcactccactgcgagcagctgcagaaattggccttatttaacaacaagctgaccgacggatgtgcgcatagtatggctaagctcctggcctgccgccaaaatttccttgcactgcggttgggcaacaattacataacagccgctggtgcacaggtactagccgaagggctgagaggcaacaccagcctccagtttctgggattctggggcaatagggtgggggatgagggagcgcaagctcttgccgaagcattaggcgaccaccagtctctgcgttggctctccttggttggtaacaatatcgggtcagtcggagcccaggctctggccctcatgctggcaaagaacgtgatgcttgaggaactgtgtttggaggagaatcatctacaggatgaaggcgtgtgcagtctggctgagggtctcaagaaaaacagctcgttaaagattctgaaactttccaataactgtatcacttatctgggcgccgaagcgctcttgcaagccctggagcgcaatgacacgatactcgaggtctggctgcgggggaacacattttctcttgaagaggttgataagctaggatgcagagacaccaggctgttgttatga

SEQ ID NO: 9163 - RNA, 3123 nt, synthetic construct
  misc_feature 1..3123: note = derived and/or modified sequence opt4 fromNOD2__Homo_sapiens__AAG33677
  source 1..3123: mol_type = other RNA
atgggcgaggagggcggcagcgccagccacgacgaggaggagagagccagcgtgctgctgggccacagccccggctgcgagatgtgcagccaggaggccttccaggcccagagaagccagctggtggagctgctggtgagcggcagcctggagggcttcgagagcgtgctggactggctgctgagctgggaggtgctgagctgggaggactacgagggcttccacctgctgggccagcccctgagccacctggccagaagactgctggacaccgtgtggaacaagggcacctgggcctgccagaagctgatcgccgccgcccaggaggcccaggccgacagccagagccccaagctgcacggctgctgggacccccacagcctgcaccccgccagagacctgcagagccacagacccgccatcgtgagaagactgcacagccacgtggagaacatgctggacctggcctgggagagaggcttcgtgagccagtacgagtgcgacgagatcagactgcccatcttcacccccagccagagagccagaagactgctggacctggccaccgtgaaggccaacggcctggccgccttcctgctgcagcacgtgcaggagctgcccgtgcccctggccctgcccctggaggccgccacctgcaagaagtacatggccaagctgagaaccaccgtgagcgcccagagcagattcctgagcacctacgacggcgccgagaccctgtgcctggaggacatctacaccgagaacgtgctggaggtgtgggccgacgtgggcatggccggccccccccagaagagccccgccaccctgggcctggaggagctgttcagcacccccggccacctgaacgacgacgccgacaccgtgctggtggtgggcgaggccggcagcggcaagagcaccctgctgcagagactgcacctgctgtgggccgccggccaggacttccaggagttcctgttcgtgttccccttcagctgcagacagctgcagtgcatggccaagcccctgagcgtgagaaccctgctgttcgagcactgctgctggcccgacgtgggccaggaggacatcttccagctgctgctggaccaccccgacagagtgctgctgaccttcgacggcttcgacgagttcaagttcagattcaccgacagagagagacactgcagccccaccgaccccaccagcgtgcagaccctgctgttcaacctgctgcagggcaacctgctgaagaacgccagaaaggtggtgaccagcagacccgccgccgtgagcgccttcctgagaaagtacatcagaaccgagttcaacctgaagggcttcagcgagcagggcatcgagctgtacctgagaaagagacaccacgagcccggcgtggccgacagactgatcagactgctgcaggagaccagcgccctgcacggcctgtgccacctgcccgtgttcagctggatggtgagcaagtgccaccaggagctgctgctgcaggagggcggcagccccaagaccaccaccgacatgtacctgctgatcctgcagcacttcctgctgcacgccaccccccccgacagcgccagccagggcctgggccccagcctgctgagaggcagactgcccaccctgctgcacctgggcagactggccctgtggggcctgggcatgtgctgctacgtgttcagcgcccagcagctgcaggccgcccaggtgagccccgacgacatcagcctgggcttcctggtgagagccaagggcgtggtgcccggcagcaccgcccccctggagttcctgcacatcaccttccagtgcttcttcgccgccttctacctggccctgagcgccgacgtgccccccgccctgctgagacacctgttcaactgcggcagacccggcaacagccccatggccagactgctgcccaccatgtgcatccaggccagcgagggcaaggacagcagcgtggccgccctgctgcagaaggccgagccccacaacctgcagatcaccgccgccttcctggccggcctgctgagcagagagcactggggcctgctggccgagtgccagaccagcgagaaggccctgctgagaagacaggcctgcgccagatggtgcctggccagaagcctgagaaagcacttccacagcatcccccccgccgcccccggcgaggccaagagcgtgcacgccatgcccggcttcatctggctgatcagaagcctgtacgagatgcaggaggagagactggccagaaaggccgccagaggcctgaacgtgggccacctgaagctgaccttctgcagcgtgggccccaccgagtgcgccgccctggccttcgtgctgcagcacctgagaagacccgtggccctgcagctggactacaacagcgtgggcgacatcggcgtggagcagctgctgccctgcctgggcgtgtgcaaggccctgtacctgagagacaacaacatcagcgacagaggcatctgcaagctgatcgagtgcgccctgcactgcgagcagctgcagaagctggccctgttcaacaacaagctgaccgacggctgcgcccacagcatggccaagctgctggcctgcagacagaacttcctggccctgagactgggcaacaactacatcaccgccgccggcgcccaggtgctggccgagggcctgagaggcaacaccagcctgcagttcctgggcttctggggcaacagagtgggcgacgagggcgcccaggccctggccgaggccctgggcgaccaccagagcctgagatggctgagcctggtgggcaacaacatcggcagcgtgggcgcccaggccctggccctgatgctggccaagaacgtgatgctggaggagctgtgcctggaggagaaccacctgcaggacgagggcgtgtgcagcctggccgagggcctgaagaagaacagcagcctgaagatcctgaagctgagcaacaactgcatcacctacctgggcgccgaggccctgctgcaggccctggagagaaacgacaccatcctggaggtgtggctgagaggcaacaccttcagcctggaggaggtggacaagctgggctgcagagacaccagactgctgctgtga

SEQ ID NO: 9164 - RNA, 3123 nt, synthetic construct
  misc_feature 1..3123: note = derived and/or modified sequence opt5 fromNOD2__Homo_sapiens__AAG33677
  source 1..3123: mol_type = other RNA
atgggcgaggaagggggaagcgcctcccacgacgaggaagagagagcttctgtgctgctcggccatagccccgggtgcgaaatgtgttcccaggaggccttccaagcgcagcggtctcagctggtcgagcttctggttagcggatccctcgaaggctttgagtctgtgctggattggcttctgagctgggaagtgctctcctgggaggactacgaggggttccatctgctgggacagcctctcagccacctggctcgcagacttctggataccgtctggaacaagggcacatgggcctgccaaaaactcatcgccgctgcccaggaagctcaggccgactctcagtccccgaagctgcacggctgttgggatccccatagccttcaccctgcgcgggacctgcaatctcaccgccccgccattgtgagacggctccattcccacgttgagaatatgctggatctggcttgggaacgcgggtttgtgagccagtatgagtgcgacgaaatcagactccctattttcacgccctctcagcgggcccgcagactgcttgatctggctaccgtcaaagccaacggactcgcggcctttctgcttcagcatgtgcaagagctgcctgttccgctcgctctgcccctggaggccgctacatgtaagaaatacatggccaagctccggaccacagtgtccgcccagagccgcttcctgtccacctatgacggcgctgaaacactttgcctggaggatatctacaccgaaaatgtcctcgaggtgtgggcggacgtggggatggccggacctccccagaagtctcctgctacgctgggccttgaggaactgtttagcacccccgggcacctcaacgatgacgccgacacagtcctggttgtgggagaggccggctccggcaaaagcaccctgctccaaagactgcaccttctgtgggctgccgggcaggatttccaggaatttctcttcgtgtttccgttctcttgtcggcagctgcaatgcatggcgaagcctctgtccgtccgcacacttctctttgagcattgttgctggcccgacgtgggacaggaagatattttccagctgctgctcgaccaccctgatagagttctgcttaccttcgacggctttgatgagttcaaatttcggttcacggacagagaacgccattgtagccccacagatcccacctctgtgcagacactgctctttaatctgctgcaagggaaccttctcaagaatgctcggaaagtcgtgaccagcagacctgccgccgtttccgctttcctgcgcaagtatatccggaccgagtttaacctgaagggattctctgagcagggcatcgaactctacctgagaaaacgccaccatgagccgggggtggccgaccggcttattagactgctccaggaaacaagcgctctgcacggactgtgccaccttcccgtcttttcctggatggtgagcaagtgccatcaggagctcctgctgcaagagggcggctctcctaaaacgaccacagatatgtatctcctgatccttcagcacttcctgctccatgccacaccccctgactccgcgagccaggggctgggaccctctctgcttcgcggccggctcccgaccctgctgcacctcgggagactggccctttggggactgggcatgtgttgctacgtcttttccgctcagcaactccaggccgctcaggtgagccctgacgatatttccctggggttcctggttcgcgccaagggcgtggtccccggatctaccgcgcctcttgaatttctgcacatcacgttccaatgtttctttgccgctttctacctcgccctgagcgctgacgtgccccctgccctcctgcggcatctttttaattgcggcagacccgggaactccccgatggcccggctgctccctacaatgtgtattcaggcttctgagggaaaagatagctccgttgcggccctgctgcagaaggctgaaccccacaatcttcagatcaccgccgccttcctggctggcctcctgagccgcgagcattgggggctcctggccgaatgccaaacctctgagaaagcgcttctgagacggcaggcttgtgccagatggtgcctcgcccgctccctgcggaagcactttcatagcattccccctgctgccccgggagaggcgaagtctgtgcacgctatgcccggcttcatctggctgatcagatccctttatgaaatgcaggaggaacgcctggccagaaaagccgctcgggggctcaacgtcggccacctgaagctcacattttgtagcgtgggacctaccgagtgcgccgctctggccttcgtgcttcagcatctgcgcagacccgttgcgctgcaactcgactacaattctgtcggcgatattggggtggaacagctgcttccttgtctgggagtgtgcaaagccctctatctgcgggacaacaatatcagcgatcgcggcatttgcaagctcatcgagtgtgctctgcactgcgagcagcttcagaaactggccctgtttaacaacaagctcacagacgggtgtgctcattccatggccaagctgcttgcctgcagacaaaatttcctggctctccggctgggaaacaattacattacggcggccggcgctcaggtcctcgccgaagggctgcgcggcaacaccagccttcagtttctgggattctggggcaatagagtgggggatgagggagcccaagctctggccgaagcgctcggcgaccaccagtctctgcggtggctttccctggttgggaacaatatcggaagcgtgggcgctcaggccctcgccctgatgctcgctaaaaacgtcatgctggaggaactttgtctggaggagaatcatctgcaggatgaaggggtgtgctccctcgccgagggcctgaagaaaaactctagccttaagatcctgaaactctccaataactgtattacatatctgggagcggaagctctgctccaagcccttgagcgcaatgacaccatcctggaggtttggctgagaggcaacacattttctctcgaagaggtggataagctggggtgccgggacaccagacttctgctctga

SEQ ID NO: 9165 - protein, 1065 aa, synthetic construct
  REGION 1..1065: note = NOD3__Homo_sapiens__C3VPR7
MRKQEVRTGREAGQGHGTGSPAEQVKALMDLLAGKGSQGSQAPQALDRTPDAPLGPCSNDSRIQRHRKALLSKVGGGPELGGPWHRLASLLLVEGLTDLQLREHDFTQVEATRGGGHPARTVALDRLFLPLSRVSVPPRVSITIGVAGMGKTTLVRHFVRLWAHGQVGKDFSLVLPLTFRDLNTHEKLCADRLICSVFPHVGEPSLAVAVPARALLILDGLDECRTPLDFSNTVACTDPKKEIPVDHLITNIIRGNLFPEVSIWITSRPSASGQIPGGLVDRMTEIRGFNEEEIKVCLEQMFPEDQALLGWMLSQVQADRALYLMCTVPAFCRLTGMALGHLWRSRTGPQDAELWPPRTLCELYSWYFRMALSGEGQEKGKASPRIEQVAHGGRKMVGTLGRLAFHGLLKKKYVFYEQDMKAFGVDLALLQGAPCSCFLQREETLASSVAYCFTHLSLQEFVAAAYYYGASRRAIFDLFTESGVSWPRLGFLTHFRSAAQRAMQAEDGRLDVFLRFLSGLLSPRVNALLAGSLLAQGEHQAYRTQVAELLQGCLRPDAAVCARAINVLHCLHELQHTELARSVEEAMESGALARLTGPAHRAALAYLLQVSDACAQEANLSLSLSQGVLQSLLPQLLYCRKLRLDTNQFQDPVMELLGSVLSGKDCRIQKISLAENQISNKGAKALARSLLVNRSLTSLDLRGNSIGPQGAKALADALKINRTLTSLSLQGNTVRDDGARSMAEALASNRTLSMLHLQKNSIGPMGAQRMADALKQNRSLKELMFSSNSIGDGGAKALAEALKVNQGLESLDLQSNSISDAGVAALMGALCTNQTLLSLSLRENSISPEGAQAIAHALCANSTLKNLDLTANLLHDQGARAIAVAVRENRTLTSLHLQWNFIQAGAAQALGQALQLNRSLTSLDLQENAIGDDGACAVARALKVNTALTALYLQVASIGASGAQVLGEALAVNRTLEILDLRGNAIGVAGAKALANALKVNSSLRRLNLQENSLGMDGAICIATALSGNHRLQHINLQGNHIGDSGARMISEAIKTNAPTCTVEM

SEQ ID NO: 9166 - RNA, 3198 nt, synthetic construct
  misc_feature 1..3198: note = NOD3__Homo_sapiens__ACP40993
  source 1..3198: mol_type = other RNA
atgaggaagcaagaggtgcggacgggcagggaggccggccagggccacggtacgggctccccagccgagcaggtgaaagccctcatggatctgctggctgggaagggcagtcaaggctcccaggccccgcaggccctggataggacaccggatgccccgctggggccctgcagcaatgactcaaggatacagaggcaccgcaaggccctgctgagcaaggtgggaggtggcccggagctgggcggaccctggcacaggctggcctccctcctgctggtggagggcctgacggacctgcagctgagggaacacgacttcacacaggtggaggccacccgcgggggcgggcaccccgccaggaccgtcgccctggaccggctcttcctgcctctctcccgggtgtctgtcccaccccgggtctccatcactatcggggtggccggcatgggcaagaccaccctggtgaggcacttcgtccgcctctgggcccatgggcaggtcggcaaggacttctcgctggtgctgcctctgaccttccgggatctcaacacccacgagaagctgtgtgccgaccgactcatctgctcggtcttcccgcacgtcggggagcccagcctggcggtggcagtcccagccagggccctcctgatcctggacggcttggatgagtgcaggacgcctctggacttctccaacaccgtggcctgcacggacccaaagaaggagatcccggtggaccacctgatcaccaacatcatccgtggcaacctctttccggaagtttccatctggatcacctcccgtcccagtgcatctggccagatcccagggggcctggtggaccggatgacggagatccggggctttaacgaggaggagatcaaggtgtgtttggagcagatgttccccgaggaccaggcccttctgggctggatgctgagccaagtgcaggctgacagggccctgtacctgatgtgcaccgtcccagccttctgcaggctcacggggatggcgctaggccacctgtggcgcagcaggacggggccccaggatgcagagctgtggcccccgaggaccctgtgcgagctctactcatggtactttaggatggccctcagcggggaggggcaggagaagggcaaggcaagccctcgcatcgagcaggtggcccatggtggccgcaagatggtggggacattgggccgtctggccttccatgggctgctcaagaagaaatacgtgttttacgagcaagacatgaaggcgtttggtgtagacctcgctctgctgcagggcgccccgtgcagctgcttcctgcagagagaggagacgttggcatcgtcagtggcctactgcttcacccacctgtccctgcaggagtttgtggcagccgcgtattactatggcgcatccaggagggccatcttcgacctcttcactgagagcggcgtatcctggcccaggctgggcttcctcacgcatttcaggagcgcagcccagcgggccatgcaggcagaggacgggaggctggacgtgttcctgcgcttcctctccggcctcttgtctccgagggtcaatgccctcctggccggctccctgctggcccaaggcgagcaccaggcctaccggacccaggtggctgagctcctgcagggctgcctgcgccccgatgccgcagtctgtgcacgggccatcaacgtgttgcactgcctgcatgagctgcagcacaccgagctggcccgcagcgtggaggaggccatggagagcggggccctggccaggctgactggtcccgcgcaccgcgctgccctggcctacctcctgcaggtgtccgacgcctgtgcccaggaggccaacctgtccctgagcctcagccagggcgtccttcagagcctgctgccccagctgctctactgccggaagctcaggctggacaccaaccagttccaggaccccgtgatggagctgctgggcagcgtgctgagtgggaaggactgtcgcattcagaagatcagcttggcggagaaccagatcagtaacaaaggggccaaagctctggccagatccctcttggtcaacagaagtctgacctctctggacctccgcggtaactccattggaccacaaggggccaaggcgctggcagacgctttgaagatcaaccgcaccctgacctccctgagcctccagggcaacaccgttagggatgatggtgccaggtccatggctgaggccttggcctccaaccggaccctctccatgctgcacctgcagaagaacagcatcgggcccatgggagcccagcggatggcagatgccttgaagcagaacaggagtctgaaagagctcatgttctccagtaatagtattggtgatggaggtgccaaggccctggctgaggccctgaaggtgaaccagggcctggagagcctggacctgcagagcaattccatcagtgacgcaggagtggcagcactgatgggggccctctgcaccaaccagaccctcctcagcctcagccttcgagaaaactccatcagtcccgagggagcccaggccatcgctcatgccctctgcgccaacagcaccctgaagaacctggacctgacagccaacctcctccacgaccagggtgcccgggccatcgcagtggcagtgagagaaaaccgcaccctcacctcccttcacctgcagtggaacttcatccaggccggcgctgcccaggccctgggacaagcactacagctcaacaggagcctcaccagcttagatttacaggagaacgccatcggggatgacggagcgtgtgcggtggcccgtgcactgaaggtcaacacagccctcactgctctctatctccaggtggcctcaattggtgcttcaggcgcccaggtgctaggggaagccttggctgtgaacagaaccttggagattctcgacttaagaggaaatgccattggggtggctggagccaaagccctggcaaatgctctgaaggtaaactcaagtctccggagactcaatcttcaagagaattctctggggatggacggggcgatatgcattgccacagcactgtctggaaaccacaggctccagcatatcaatctccagggaaaccacattggggactccggggccaggatgatctcagaggccatcaagacaaatgctcccacgtgcactgttgaaatgtga

SEQ ID NO: 9167 - RNA, 3198 nt, synthetic construct
  misc_feature 1..3198: note = derived and/or modified sequence opt1 fromNOD3__Homo_sapiens__ACP40993
  source 1..3198: mol_type = other RNA
atgcgcaagcaggaggtgcggaccggccgcgaggccgggcagggccacgggaccggcagccccgccgagcaggtcaaggcgctgatggacctcctggccgggaagggctcccagggcagccaggccccgcaggccctggaccggacccccgacgcgcccctcgggccctgctccaacgacagccgcatccagcggcaccgcaaggccctgctgtccaaggtgggcgggggcccggagctcgggggcccctggcaccggctggccagcctgctcctggtggagggcctgaccgacctccagctgcgcgagcacgacttcacccaggtcgaggccacccgcgggggcgggcaccccgcccggacggtggcgctggaccggctgttcctgcccctgtcccgcgtgagcgtcccgccccgggtgtccatcaccatcggcgtggccggcatggggaagaccaccctcgtccgccacttcgtgcggctgtgggcccacggccaggtggggaaggacttcagcctggtcctccccctgacgttccgcgacctgaacacccacgagaagctctgcgccgaccggctgatctgctccgtgttcccccacgtgggcgagccgagcctggccgtcgcggtgcccgcccgcgccctcctgatcctggacgggctcgacgagtgccggacgcccctggacttctccaacaccgtggcctgcaccgaccccaagaaggagatcccggtcgaccacctgatcaccaacatcatccgcggcaacctcttccccgaggtgagcatctggatcacctcccggcccagcgcctccggccagatccccgggggcctggtggaccgcatgaccgagatccgcgggttcaacgaggaggagatcaaggtctgcctggagcagatgttcccggaggaccaggcgctcctgggctggatgctgagccaggtgcaggccgaccgggccctctacctgatgtgcacggtgcccgccttctgccgcctgaccgggatggccctcggccacctgtggcggtcccgcaccggcccccaggacgcggagctgtggcccccgcggaccctctgcgagctgtacagctggtacttccgcatggccctgagcggggagggccaggagaaggggaaggccagcccccggatcgagcaggtcgcccacggcgggcgcaagatggtgggcacgctcggccggctggccttccacgggctgctgaagaagaagtacgtcttctacgagcaggacatgaaggcgttcggcgtggacctcgccctgctgcagggggccccctgctcctgcttcctccagcgcgaggagaccctggcctccagcgtggcgtactgcttcacccacctgtccctccaggagttcgtcgccgccgcctactactacggcgccagccggcgcgcgatcttcgacctgttcaccgagtccggcgtgagctggccccggctggggttcctcacgcacttccgctccgccgcccagcgggccatgcaggccgaggacggccgcctggacgtgttcctgcggttcctcagcgggctgctgtccccgcgcgtcaacgcgctcctggccggcagcctgctcgcccagggggagcaccaggcctaccggacccaggtggccgagctgctgcagggctgcctccgccccgacgcggccgtgtgcgcccgcgccatcaacgtcctgcactgcctgcacgagctccagcacaccgagctggcgcggtccgtggaggaggccatggagagcggcgccctggcccgcctcaccgggcccgcccaccgggcggccctggcctacctgctccaggtgtccgacgcctgcgcccaggaggcgaacctgagcctgtccctcagccagggcgtcctgcagtccctgctcccgcagctgctgtactgccgcaagctccggctggacacgaaccagttccaggaccccgtgatggagctgctcgggagcgtgctgagcggcaaggactgccgcatccagaagatctccctggccgagaaccagatcagcaacaagggggccaaggccctcgcccggtccctgctggtcaaccgcagcctcacctccctggacctgcggggcaacagcatcggcccccagggggcgaaggccctcgccgacgccctgaagatcaaccgcaccctgacctccctcagcctgcagggcaacacggtgcgggacgacggggcgcgctccatggccgaggccctggccagcaaccggaccctctccatgctgcacctccagaagaacagcatcggccccatgggggcccagcgcatggcggacgccctcaagcagaaccggtccctgaaggagctgatgttcagctccaacagcatcggcgacggcggggccaaggccctcgccgaggcgctgaaggtgaaccagggcctggagtccctcgacctgcagagcaacagcatctccgacgccggggtcgccgccctgatgggcgccctctgcaccaaccagaccctgctgagcctctccctgcgcgagaacagcatctccccggagggggcgcaggccatcgcccacgccctgtgcgccaacagcacgctcaagaacctggacctgaccgcgaacctcctgcacgaccagggcgcccgggccatcgccgtggcggtgcgcgagaaccggaccctgacctccctccacctccagtggaacttcatccaggccggcgccgcccaggccctggggcaggcgctgcagctgaaccgcagcctgacctccctcgacctgcaggagaacgccatcggcgacgacggggcctgcgccgtcgcccgggcgctgaaggtgaacacggccctcaccgccctgtacctccaggtggccagcatcggcgcctccggcgcgcaggtcctgggggaggccctggccgtgaaccgcaccctggagatcctggacctccgcggcaacgccatcggggtggcgggcgccaaggccctggccaacgccctgaaggtcaacagctccctccggcgcctgaacctgcaggagaacagcctcgggatggacggcgcgatctgcatcgccaccgccctgtccggcaaccaccggctgcagcacatcaacctccaggggaaccacatcggcgacagcggggcccgcatgatctccgaggccatcaagacgaacgcgcccacgtgcaccgtggagatgtga

SEQ ID NO: 9168 - RNA, 3198 nt, synthetic construct
  misc_feature 1..3198: note = derived and/or modified sequence opt2 fromNOD3__Homo_sapiens__ACP40993
  source 1..3198: mol_type = other RNA
atgcgcaagcaggaggtccgcaccggccgcgaggccggccagggccacggcaccggctcccccgccgagcaggtcaaggccctcatggacctcctcgccggcaagggctcccagggctcccaggccccccaggccctcgaccgcacccccgacgcccccctcggcccctgctccaacgactcccgcatccagcgccaccgcaaggccctcctctccaaggtcggcggcggccccgagctcggcggcccctggcaccgcctcgcctccctcctcctcgtcgagggcctcaccgacctccagctccgcgagcacgacttcacccaggtcgaggccacccgcggcggcggccaccccgcccgcaccgtcgccctcgaccgcctcttcctccccctctcccgcgtctccgtccccccccgcgtctccatcaccatcggcgtcgccggcatgggcaagaccaccctcgtccgccacttcgtccgcctctgggcccacggccaggtcggcaaggacttctccctcgtcctccccctcaccttccgcgacctcaacacccacgagaagctctgcgccgaccgcctcatctgctccgtcttcccccacgtcggcgagccctccctcgccgtcgccgtccccgcccgcgccctcctcatcctcgacggcctcgacgagtgccgcacccccctcgacttctccaacaccgtcgcctgcaccgaccccaagaaggagatccccgtcgaccacctcatcaccaacatcatccgcggcaacctcttccccgaggtctccatctggatcacctcccgcccctccgcctccggccagatccccggcggcctcgtcgaccgcatgaccgagatccgcggcttcaacgaggaggagatcaaggtctgcctcgagcagatgttccccgaggaccaggccctcctcggctggatgctctcccaggtccaggccgaccgcgccctctacctcatgtgcaccgtccccgccttctgccgcctcaccggcatggccctcggccacctctggcgctcccgcaccggcccccaggacgccgagctctggcccccccgcaccctctgcgagctctactcctggtacttccgcatggccctctccggcgagggccaggagaagggcaaggcctccccccgcatcgagcaggtcgcccacggcggccgcaagatggtcggcaccctcggccgcctcgccttccacggcctcctcaagaagaagtacgtcttctacgagcaggacatgaaggccttcggcgtcgacctcgccctcctccagggcgccccctgctcctgcttcctccagcgcgaggagaccctcgcctcctccgtcgcctactgcttcacccacctctccctccaggagttcgtcgccgccgcctactactacggcgcctcccgccgcgccatcttcgacctcttcaccgagtccggcgtctcctggccccgcctcggcttcctcacccacttccgctccgccgcccagcgcgccatgcaggccgaggacggccgcctcgacgtcttcctccgcttcctctccggcctcctctccccccgcgtcaacgccctcctcgccggctccctcctcgcccagggcgagcaccaggcctaccgcacccaggtcgccgagctcctccagggctgcctccgccccgacgccgccgtctgcgcccgcgccatcaacgtcctccactgcctccacgagctccagcacaccgagctcgcccgctccgtcgaggaggccatggagtccggcgccctcgcccgcctcaccggccccgcccaccgcgccgccctcgcctacctcctccaggtctccgacgcctgcgcccaggaggccaacctctccctctccctctcccagggcgtcctccagtccctcctcccccagctcctctactgccgcaagctccgcctcgacaccaaccagttccaggaccccgtcatggagctcctcggctccgtcctctccggcaaggactgccgcatccagaagatctccctcgccgagaaccagatctccaacaagggcgccaaggccctcgcccgctccctcctcgtcaaccgctccctcacctccctcgacctccgcggcaactccatcggcccccagggcgccaaggccctcgccgacgccctcaagatcaaccgcaccctcacctccctctccctccagggcaacaccgtccgcgacgacggcgcccgctccatggccgaggccctcgcctccaaccgcaccctctccatgctccacctccagaagaactccatcggccccatgggcgcccagcgcatggccgacgccctcaagcagaaccgctccctcaaggagctcatgttctcctccaactccatcggcgacggcggcgccaaggccctcgccgaggccctcaaggtcaaccagggcctcgagtccctcgacctccagtccaactccatctccgacgccggcgtcgccgccctcatgggcgccctctgcaccaaccagaccctcctctccctctccctccgcgagaactccatctcccccgagggcgcccaggccatcgcccacgccctctgcgccaactccaccctcaagaacctcgacctcaccgccaacctcctccacgaccagggcgcccgcgccatcgccgtcgccgtccgcgagaaccgcaccctcacctccctccacctccagtggaacttcatccaggccggcgccgcccaggccctcggccaggccctccagctcaaccgctccctcacctccctcgacctccaggagaacgccatcggcgacgacggcgcctgcgccgtcgcccgcgccctcaaggtcaacaccgccctcaccgccctctacctccaggtcgcctccatcggcgcctccggcgcccaggtcctcggcgaggccctcgccgtcaaccgcaccctcgagatcctcgacctccgcggcaacgccatcggcgtcgccggcgccaaggccctcgccaacgccctcaaggtcaactcctccctccgccgcctcaacctccaggagaactccctcggcatggacggcgccatctgcatcgccaccgccctctccggcaaccaccgcctccagcacatcaacctccagggcaaccacatcggcgactccggcgcccgcatgatctccgaggccatcaagaccaacgcccccacctgcaccgtcgagatgtga

SEQ ID NO: 9169 - RNA, 3198 nt, synthetic construct
  misc_feature 1..3198: note = derived and/or modified sequence opt3 fromNOD3__Homo_sapiens__ACP40993
  source 1..3198: mol_type = other RNA
atgagaaagcaggaggtgaggaccggccgggaagccgggcaaggacacggtacaggcagccccgctgagcaggtcaaagcactgatggacctccttgccgggaagggatcccagggctctcaggcgcctcaagctctggatcgcactccagacgccccgttgggtccctgctcaaacgatagtcgaatccagcgtcatagaaaagcattactgagcaaggttgggggaggccctgaactaggcgggccatggcacaggctcgcctccctgcttctggtggagggattgacggacctccagctgcgggaacatgatttcacccaggtagaggctacacgcggtggcgggcaccccgcaagaactgtggccctggacaggctctttttacctctgtctcgggtctcggtgccaccccgcgtttcaattaccataggagtggctggcatgggtaaaacaacccttgtccgacatttcgtgagattgtgggcccacgggcaagtaggaaaggattttagcctggttctacctctcactttcagggacctgaatacacacgagaaactttgtgcggatcggctgatctgcagtgtgtttccacatgtcggcgaaccgtccttggcagtggccgtgcccgctcgtgccctcctgattttagacggcctggatgagtgtcgcacccctctcgacttctctaacacggtcgcatgcactgatcccaaaaaggaaatcccagttgaccaccttattaccaatatcataagagggaacctgtttcctgaggtgagcatctggattacatccaggccatcagctagtggacagatccccggtggcttggtagaccggatgactgagattcgagggttcaatgaagaggaaatcaaagtgtgtctagagcagatgtttccggaagatcaggccctgctcggatggatgctgagccaagtccaggcggaccgcgccctttacctgatgtgcaccgtgcctgcattctgtagattgacaggcatggctctcggtcatctgtggaggtctcggaccgggccccaggatgccgagttatggccacctcgcacgctgtgcgagctatattcctggtactttagaatggctctctcaggcgaaggacaagagaagggcaaagccagccccaggatagaacaggttgcacacgggggacgtaagatggtgggtactctgggccggcttgccttccacgggttgctgaagaaaaagtatgtcttttacgagcaggacatgaaggctttcggagtggatctcgcgctgcttcagggcgcaccatgtagttgcttcctgcaacgagaagagacattggcctcttccgtagcttattgttttacccatctcagcctgcaggagttcgttgccgcagcctactattacggtgcttcgagaagggccatttttgacttattcactgaatctggggtgtcctggccccgcctgggctttctaacacacttccggtcagcagcgcagagagctatgcaggccgaggatggaaggctcgacgtctttctgcgcttccttagtggcttgctgagccctcgagtgaacgcactcctggccgggtccttactggctcaaggagaacatcaggcctaccggacccaggtcgcagagcttttgcagggttgcctccgtccagatgctgccgtgtgcgcgagagccatcaatgttctgcactgtctacatgaactgcaacacacggagctcgctaggtctgtggaggaagcaatggagagcggcgccctggctcgccttaccgggccggcccaccgggcagcgttggcctatctgttacaggtatcagacgcttgcgcccaggaagcaaacctcagtctgtcccttagccagggagtcctgcaatctttgctcccccagctgctatactgtagaaagctgaggctcgatacaaatcagtttcaagaccctgtgatggagctgcttggctcagttttgagtggtaaagactgccgcattcagaagatcagcctggctgagaaccagatctccaataaaggggccaaggcattagcccgatctctcctggtgaaccggtcgcttactagcctggatctaagaggcaattccattggaccacagggcgctaaggcgctcgccgacgcactgaaaataaacaggaccttgacatcactgagtttacaagggaatactgtccgtgatgacggagctcgctctatggccgaagccctcgctagcaaccggaccctgtccatgcttcatctgcagaagaactcaatcggccccatgggtgcacagagaatggccgatgcgttgaaacagaataggagcctcaaggagctgatgttctcttccaacagtattggggacggaggcgctaaagccctagcagaagccctgaaggtgaatcaaggtcttgagagcctcgatctgcagtctaactccatctcagacgctggcgtagcagccttgatgggggcgctgtgtacaaatcagaccttactcagtctgagccttcgagaaaactcgatatcccctgagggagctcaggccattgcacacgccctgtgcgctaattctactttgaagaacctcgatctgacggccaatctactgcatgaccaaggcgcacgggctatcgccgtggcggttcgcgagaacagaacacttaccagcctccatctgcagtggaattttatccaggccggggcagctcaagccttgggacaggctttacagctgaacaggtcactcacttcactggatcttcaggaaaatgcaattggcgacgatggtgcctgtgccgtcgctcgggcgctgaaagtgaacaccgcattgacagccctatatctgcaagtggcttccatcggggcctctggagcacaggtcctcggcgaggccctggctgttaatcgaacccttgaaattttagacctgagaggtaacgcgataggcgtggccggggcaaaggctctcgccaacgcattgaaagtgaatagctccctgcgcaggctcaacctgcaggagaatagtcttggaatggacggcgccatctgcattgctactgccctgagcgggaaccaccgtttgcagcacatcaatctacaaggaaaccacatcggcgatagtggtgcgcggatgatttctgaagcaataaagacaaatgccccaacgtgtaccgtagagatgtga

SEQ ID NO: 9170 - RNA, 3198 nt, synthetic construct
  misc_feature 1..3198: note = derived and/or modified sequence opt4 fromNOD3__Homo_sapiens__ACP40993
  source 1..3198: mol_type = other RNA
atgagaaagcaggaggtgagaaccggcagagaggccggccagggccacggcaccggcagccccgccgagcaggtgaaggccctgatggacctgctggccggcaagggcagccagggcagccaggccccccaggccctggacagaacccccgacgcccccctgggcccctgcagcaacgacagcagaatccagagacacagaaaggccctgctgagcaaggtgggcggcggccccgagctgggcggcccctggcacagactggccagcctgctgctggtggagggcctgaccgacctgcagctgagagagcacgacttcacccaggtggaggccaccagaggcggcggccaccccgccagaaccgtggccctggacagactgttcctgcccctgagcagagtgagcgtgccccccagagtgagcatcaccatcggcgtggccggcatgggcaagaccaccctggtgagacacttcgtgagactgtgggcccacggccaggtgggcaaggacttcagcctggtgctgcccctgaccttcagagacctgaacacccacgagaagctgtgcgccgacagactgatctgcagcgtgttcccccacgtgggcgagcccagcctggccgtggccgtgcccgccagagccctgctgatcctggacggcctggacgagtgcagaacccccctggacttcagcaacaccgtggcctgcaccgaccccaagaaggagatccccgtggaccacctgatcaccaacatcatcagaggcaacctgttccccgaggtgagcatctggatcaccagcagacccagcgccagcggccagatccccggcggcctggtggacagaatgaccgagatcagaggcttcaacgaggaggagatcaaggtgtgcctggagcagatgttccccgaggaccaggccctgctgggctggatgctgagccaggtgcaggccgacagagccctgtacctgatgtgcaccgtgcccgccttctgcagactgaccggcatggccctgggccacctgtggagaagcagaaccggcccccaggacgccgagctgtggccccccagaaccctgtgcgagctgtacagctggtacttcagaatggccctgagcggcgagggccaggagaagggcaaggccagccccagaatcgagcaggtggcccacggcggcagaaagatggtgggcaccctgggcagactggccttccacggcctgctgaagaagaagtacgtgttctacgagcaggacatgaaggccttcggcgtggacctggccctgctgcagggcgccccctgcagctgcttcctgcagagagaggagaccctggccagcagcgtggcctactgcttcacccacctgagcctgcaggagttcgtggccgccgcctactactacggcgccagcagaagagccatcttcgacctgttcaccgagagcggcgtgagctggcccagactgggcttcctgacccacttcagaagcgccgcccagagagccatgcaggccgaggacggcagactggacgtgttcctgagattcctgagcggcctgctgagccccagagtgaacgccctgctggccggcagcctgctggcccagggcgagcaccaggcctacagaacccaggtggccgagctgctgcagggctgcctgagacccgacgccgccgtgtgcgccagagccatcaacgtgctgcactgcctgcacgagctgcagcacaccgagctggccagaagcgtggaggaggccatggagagcggcgccctggccagactgaccggccccgcccacagagccgccctggcctacctgctgcaggtgagcgacgcctgcgcccaggaggccaacctgagcctgagcctgagccagggcgtgctgcagagcctgctgccccagctgctgtactgcagaaagctgagactggacaccaaccagttccaggaccccgtgatggagctgctgggcagcgtgctgagcggcaaggactgcagaatccagaagatcagcctggccgagaaccagatcagcaacaagggcgccaaggccctggccagaagcctgctggtgaacagaagcctgaccagcctggacctgagaggcaacagcatcggcccccagggcgccaaggccctggccgacgccctgaagatcaacagaaccctgaccagcctgagcctgcagggcaacaccgtgagagacgacggcgccagaagcatggccgaggccctggccagcaacagaaccctgagcatgctgcacctgcagaagaacagcatcggccccatgggcgcccagagaatggccgacgccctgaagcagaacagaagcctgaaggagctgatgttcagcagcaacagcatcggcgacggcggcgccaaggccctggccgaggccctgaaggtgaaccagggcctggagagcctggacctgcagagcaacagcatcagcgacgccggcgtggccgccctgatgggcgccctgtgcaccaaccagaccctgctgagcctgagcctgagagagaacagcatcagccccgagggcgcccaggccatcgcccacgccctgtgcgccaacagcaccctgaagaacctggacctgaccgccaacctgctgcacgaccagggcgccagagccatcgccgtggccgtgagagagaacagaaccctgaccagcctgcacctgcagtggaacttcatccaggccggcgccgcccaggccctgggccaggccctgcagctgaacagaagcctgaccagcctggacctgcaggagaacgccatcggcgacgacggcgcctgcgccgtggccagagccctgaaggtgaacaccgccctgaccgccctgtacctgcaggtggccagcatcggcgccagcggcgcccaggtgctgggcgaggccctggccgtgaacagaaccctggagatcctggacctgagaggcaacgccatcggcgtggccggcgccaaggccctggccaacgccctgaaggtgaacagcagcctgagaagactgaacctgcaggagaacagcctgggcatggacggcgccatctgcatcgccaccgccctgagcggcaaccacagactgcagcacatcaacctgcagggcaaccacatcggcgacagcggcgccagaatgatcagcgaggccatcaagaccaacgcccccacctgcaccgtggagatgtga

SEQ ID NO: 9171 - RNA, 3198 nt, synthetic construct
  misc_feature 1..3198: note = derived and/or modified sequence opt5 fromNOD3__Homo_sapiens__ACP40993
  source 1..3198: mol_type = other RNA
atgagaaagcaggaggtgcggaccggccgcgaagccgggcaaggacacggcacagggagccccgctgagcaggtcaaagccctgatggacctcctggcgggaaagggctcccaggggtctcaggctcctcaagcccttgatagaacgccggacgctcccctgggaccttgcagcaacgattcccggatccagcgccatagaaaagccctcctgtctaaggttggcggcgggcccgaacttggaggcccttggcaccggctggccagcctcctgctggtggaggggctcaccgacctgcagcttcgcgaacatgatttcacacaggtggaggctaccagaggaggcgggcaccccgcccggacagtcgcgctggaccgcctctttctgcctctttccagagtgtctgttccgccccgggtgagcattaccatcggagtcgccggcatgggcaaaacaaccctggtgcgccatttcgttagactctgggctcacgggcaagtgggaaaggatttttccctggtcctgcctctcacgttccgggacctgaatacccacgagaaactttgtgccgatcgcctgatttgcagcgtgtttccccatgtgggcgaaccttctctcgctgtcgccgttcccgcgagagccctgcttatcctggacgggctcgatgagtgtcggacaccgctggacttctccaacaccgtggcttgcacagatcctaagaaggaaattcccgtggaccacctgatcaccaatatcattagaggaaacctctttcctgaggtcagcatctggattacgtctcgcccctccgccagcggccagatccccgggggactggtggaccggatgacagagattagaggcttcaatgaagaggaaatcaaagtttgtcttgagcagatgtttcctgaagatcaggctctgctcggctggatgctgtctcaagtgcaggccgaccgcgccctttacctgatgtgcaccgtcccggctttctgtcggctcacagggatggcgctgggacatctgtggagatcccgcaccggcccccaggatgccgagctctggcctccccggaccctgtgcgagctttatagctggtactttagaatggctctgtccggggaaggacaagagaagggcaaagcctctcctcgcattgaacaggtggcccacgggggccggaagatggttggaacactcggcagactggctttccacgggctgcttaagaaaaagtatgtgttttacgagcaggacatgaaagccttcggagtcgatctcgcgctgctgcagggcgctccctgtagctgcttcctccaacgcgaagagacgctggcctccagcgtggcctattgttttacccatctttctctgcaggagttcgtcgctgccgcttactattacggggcctcccggagagcgatctttgacctcttcacagaaagcggagtgtcttggccgcggctgggctttctgacccacttccgcagcgccgctcagagagccatgcaggctgaggatgggcggcttgacgtttttctcagattcctgtccggcctgctctctcctcgcgtgaacgccctgcttgcgggaagcctgctcgcccaaggcgaacatcaggcttaccggacacaggtcgccgagctgctgcaggggtgccttagacccgatgctgccgtgtgcgcccgcgctatcaatgttctccactgtctgcatgaactgcaacacaccgagctcgcgagatccgtggaggaagccatggagagcggagctctggcccggcttacgggccctgcccaccgcgctgccctggcgtatctcctgcaggtctctgacgcttgcgcccaggaagccaacctgtcccttagcctctctcagggggtgctgcaatccctgctcccccagctgctttactgtagaaagctgcggctcgatacaaatcagtttcaagaccctgtgatggagctgctgggaagcgttctttccggcaaagactgccgcattcagaagatctctctggctgagaaccagattagcaataaaggggccaaggcgctcgctagatccctgctcgtcaaccggtctctgaccagccttgatctgcgcggcaattccatcggaccccagggcgccaaggccctcgctgacgccctgaaaattaacagaaccctgacaagcctttctctgcaagggaataccgtgcgggatgacggagctcgctccatggccgaagcgctcgccagcaacagaacactgtctatgctccatctgcagaagaactccatcggcccgatgggggctcagcggatggccgatgctcttaaacagaatagaagcctgaaggagctcatgttctctagcaactccatcggagacggcggggccaaagccctggctgaagcgctgaaggtgaatcaaggccttgagagcctggatctccagtctaactccattagcgacgccggagtcgctgccctgatgggcgccctctgtacgaatcagaccctgctttccctgtctctgcgcgaaaacagcatctcccctgagggggctcaggccattgcgcacgctctctgcgccaattctacactgaagaaccttgatctgaccgccaatctcctgcatgaccaaggagctcgggccatcgcggtggctgttagagagaaccgcacactcaccagcctgcaccttcagtggaattttattcaggccggcgccgctcaagccctggggcaggctctgcagctcaaccggtccctgacgtctcttgatctgcaggaaaatgccatcggagacgatggcgcgtgtgccgtggctagagccctcaaagtcaacaccgctctgacagccctctatctgcaagtggccagcatcggcgcttccggggcgcaggttcttggagaggccctggctgtgaatcgcaccctggaaattctcgacctgcggggcaacgccatcggggtcgccggagctaaggcccttgcgaacgctctgaaagtgaatagctctctcagacgcctgaacctccaggaaaattccctgggcatggacggggccatttgcatcgccacagctcttagcggaaaccaccggctgcagcatattaatctgcaaggcaaccacatcggcgattctggggccagaatgatttccgaggcgatcaagaccaatgcccccacgtgtacagttgagatgtga

SEQ ID NO: 9172 - protein, 1112 aa, synthetic construct
  REGION 1..1112: note = NOD3__Homo_sapiens__H3BLT9
MEMDAPRPPSLAVPGAASRPGRLLDGGHGRQQVQALSSQLLEVIPDSMRKQEVRTGREAGQGHGTGSPAEQVKALMDLLAGKGSQGSQAPQALDRTPDAPLGPCSNDSRIQRHRKALLSKVGGGPELGGPWHRLASLLLVEGLTDLQLREHDFTQVEATRGGGHPARTVALDRLFLPLSRVSVPPRVSITIGVAGMGKTTLVRHFVRLWAHGQVGKDFSLVLPLTFRDLNTHEKLCADRLICSVFPHVGEPSLAVAVPARALLILDGLDECRTPLDFSNTVACTDPKKEIPVDHLITNIIRGNLFPEVSIWITSRPSASGQIPGGLVDRMTEIRGFNEEEIKVCLEQMFPEDQALLGWMLSQVQADRALYLMCTVPAFCRLTGMALGHLWRSRTGPQDAELWPPRTLCELYSWYFRMALSGEGQEKGKASPRIEQVAHGGRKMVGTLGRLAFHGLLKKKYVFYEQDMKAFGVDLALLQGAPCSCFLQREETLASSVAYCFTHLSLQEFVAAAYYYGASRRAIFDLFTESGVSWPRLGFLTHFRSAAQRAMQAEDGRLDVFLRFLSGLLSPRVNALLAGSLLAQGEHQAYRTQVAELLQGCLRPDAAVCARAINVLHCLHELQHTELARSVEEAMESGALARLTGPAHRAALAYLLQVSDACAQEANLSLSLSQGVLQSLLPQLLYCRKLRLDTNQFQDPVMELLGSVLSGKDCRIQKISLAENQISNKGAKALARSLLVNRSLTSLDLRGNSIGPQGAKALADALKINRTLTSLSLQGNTVRDDGARSMAEALASNRTLSMLHLQKNSIGPMGAQRMADALKQNRSLKELMFSSNSIGDGGAKALAEALKVNQGLESLDLQSNSISDAGVAALMGALCTNQTLLSLSLRENSISPEGAQAIAHALCANSTLKNLDLTANLLHDQGARAIAVAVRENRTLTSLHLQWNFIQAGAAQALGQALQLNRSLTSLDLQENAIGDDGACAVARALKVNTALTALYLQVASIGASGAQVLGEALAVNRTLEILDLRGNAIGVAGAKALANALKVNSSLRRLNLQENSLGMDGAICIATALSGNHRLQHINLQGNHIGDSGARMISEAIKTNAPTCTVEM

SEQ ID NO: 9173 - RNA, 3339 nt, synthetic construct
  misc_feature 1..3339: note = NOD3__Homo_sapiens__EAW85351
  source 1..3339: mol_type = other RNA
atggagatggacgcccccaggccccccagtcttgctgtccctggagcagcatcgaggcccgggaggctgctggatggggggcacggcaggcagcaggttcaggccctctcttcacagctcctggaggtgatccccgactccatgaggaagcaagaggtgcggacgggcagggaggccggccagggccacggtacgggctccccagccgagcaggtgaaagccctcatggatctgctggctgggaagggcagtcaaggctcccaggccccgcaggccctggataggacaccggatgccccgctggggccctgcagcaatgactcaaggatacagaggcaccgcaaggccctgctgagcaaggtgggaggtggcccggagctgggcggaccctggcacaggctggcctccctcctgctggtggagggcctgacggacctgcagctgagggaacacgacttcacacaggtggaggccacccgcgggggcgggcaccccgccaggaccgtcgccctggaccggctcttcctgcctctctcccgggtgtctgtcccaccccgggtctccatcactatcggggtggccggcatgggcaagaccaccctggtgaggcacttcgtccgcctctgggcccatgggcaggtcggcaaggacttctcgctggtgctgcctctgaccttccgggatctcaacacccacgagaagctgtgtgccgaccgactcatctgctcggtcttcccgcacgtcggggagcccagcctggcggtggcagtcccagccagggccctcctgatcctggacggcttggatgagtgcaggacgcctctggacttctccaacaccgtggcctgcacggacccaaagaaggagatcccggtggaccacctgatcaccaacatcatccgtggcaacctctttccggaagtttccatctggatcacctcccgtcccagtgcatctggccagatcccagggggcctggtggaccggatgacggagatccggggctttaacgaggaggagatcaaggtgtgtttggagcagatgttccccgaggaccaggcccttctgggctggatgctgagccaagtgcaggctgacagggccctgtacctgatgtgcaccgtcccagccttctgcaggctcacggggatggcgctaggccacctgtggcgcagcaggacggggccccaggatgcagagctgtggcccccgaggaccctgtgcgagctctactcatggtactttaggatggccctcagcggggaggggcaggagaagggcaaggcaagccctcgcatcgagcaggtggcccatggtggccgcaagatggtggggacattgggccgtctggccttccatgggctgctcaagaagaaatacgtgttttacgagcaagacatgaaggcgtttggtgtagacctcgctctgctgcagggcgccccgtgcagctgcttcctgcagagagaggagacgttggcatcgtcagtggcctactgcttcacccacctgtccctgcaggagtttgtggcagccgcgtattactatggcgcatccaggagggccatcttcgacctcttcactgagagcggcgtatcctggcccaggctgggcttcctcacgcatttcaggagcgcagcccagcgggccatgcaggcagaggacgggaggctggacgtgttcctgcgcttcctctccggcctcttgtctccgagggtcaatgccctcctggccggctccctgctggcccaaggcgagcaccaggcctaccggacccaggtggctgagctcctgcagggctgcctgcgccccgatgccgcagtctgtgcacgggccatcaacgtgttgcactgcctgcatgagctgcagcacaccgagctggcccgcagcgtggaggaggccatggagagcggggccctggccaggctgactggtcccgcgcaccgcgctgccctggcctacctcctgcaggtgtccgacgcctgtgcccaggaggccaacctgtccctgagcctcagccagggcgtccttcagagcctgctgccccagctgctctactgccggaagctcaggctggacaccaaccagttccaggaccccgtgatggagctgctgggcagcgtgctgagtgggaaggactgtcgcattcagaagatcagcttggcggagaaccagatcagtaacaaaggggccaaagctctggccagatccctcttggtcaacagaagtctgacctctctggacctccgcggtaactccattggaccacaaggggccaaggcgctggcagacgctttgaagatcaaccgcaccctgacctccctgagcctccagggcaacaccgttagggatgatggtgccaggtccatggctgaggccttggcctccaaccggaccctctccatgctgcacctgcagaagaacagcatcgggcccatgggagcccagcggatggcagatgccttgaagcagaacaggagtctgaaagagctcatgttctccagtaatagtattggtgatggaggtgccaaggccctggctgaggccctgaaggtgaaccagggcctggagagcctggacctgcagagcaattccatcagtgacgcaggagtggcagcactgatgggggccctctgcaccaaccagaccctcctcagcctcagccttcgagaaaactccatcagtcccgagggagcccaggccatcgctcatgccctctgcgccaacagcaccctgaagaacctggacctgacagccaacctcctccacgaccagggtgcccgggccatcgcagtggcagtgagagaaaaccgcaccctcacctcccttcacctgcagtggaacttcatccaggccggcgctgcccaggccctgggacaagcactacagctcaacaggagcctcaccagcttagatttacaggagaacgccatcggggatgacggagcgtgtgcggtggcccgtgcactgaaggtcaacacagccctcactgctctctatctccaggtggcctcaattggtgcttcaggcgcccaggtgctaggggaagccttggctgtgaacagaaccttggagattctcgacttaagaggaaatgccattggggtggctggagccaaagccctggcaaatgctctgaaggtaaactcaagtctccggagactcaatcttcaagagaattctctggggatggacggggcgatatgcattgccacagcactgtctggaaaccacaggctccagcatatcaatctccagggaaaccacattggggactccggggccaggatgatctcagaggccatcaagacaaatgctcccacgtgcactgttgaaatgtga

SEQ ID NO: 9174 - RNA, 3339 nt, synthetic construct
  misc_feature 1..3339: note = derived and/or modified sequence opt1 fromNOD3__Homo_sapiens__EAW85351
  source 1..3339: mol_type = other RNA
atggagatggacgcgccccgcccgcccagcctggccgtgcccggcgccgcctcccggcccgggcgcctcctggacggcgggcacggccggcagcaggtccaggccctgagctcccagctcctggaggtgatcccggacagcatgcgcaagcaggaggtgcggaccgggcgcgaggccggccagggccacgggaccggctcccccgccgagcaggtcaaggcgctgatggacctcctggccgggaagggcagccaggggtcccaggcgccccaggccctggaccggacccccgacgccccgctcggcccctgcagcaacgactcccgcatccagcggcaccgcaaggccctgctgagcaaggtgggcgggggccccgagctcgggggcccctggcaccggctggcctccctgctcctggtggagggcctgaccgacctccagctgcgcgagcacgacttcacccaggtcgaggccacccgcgggggcgggcacccggcccggacggtggcgctggaccggctgttcctgcccctgagccgcgtgtccgtcccgccccgggtgagcatcaccatcggcgtggccgggatgggcaagaccaccctcgtccgccacttcgtgcggctgtgggcccacggccaggtggggaaggacttctccctggtcctccccctgacgttccgcgacctgaacacccacgagaagctctgcgccgaccggctgatctgcagcgtgttcccccacgtgggcgagccctccctggccgtcgcggtgcccgcccgcgccctcctgatcctggacgggctcgacgagtgccgcaccccgctggacttcagcaacaccgtggcctgcacggaccccaagaaggagatccccgtcgaccacctgatcaccaacatcatccggggcaacctcttccccgaggtgtccatctggatcaccagccgcccgagcgcctccgggcagatccccggcggcctggtggaccggatgaccgagatccgcgggttcaacgaggaggagatcaaggtctgcctggagcagatgttccccgaggaccaggcgctcctgggctggatgctgagccaggtgcaggccgaccgggccctctacctgatgtgcacggtccccgccttctgccgcctgaccgggatggccctcggccacctgtggcggtcccgcaccgggccgcaggacgcggagctgtggccgccccggaccctgtgcgagctctacagctggtacttccgcatggccctgtccggcgagggccaggagaaggggaaggccagcccccggatcgagcaggtcgcccacggcgggcgcaagatggtgggcacgctgggccggctcgcgttccacgggctgctgaagaagaagtacgtgttctacgagcaggacatgaaggccttcggcgtggacctcgccctgctgcagggggccccctgctcctgcttcctccagcgcgaggagaccctggccagctccgtggcgtactgcttcacccacctgagcctccaggagttcgtcgccgccgcctactactacggcgcctcccggcgcgcgatcttcgacctgttcaccgagagcggggtgtcctggccccggctgggcttcctcacgcacttccgcagcgccgcccagcgggccatgcaggccgaggacggccgcctggacgtgttcctgcgcttcctctccgggctgctgagcccccgggtcaacgcgctcctggccggctccctgctcgcccagggggagcaccaggcctaccgcacccaggtggcggagctgctgcagggctgcctccggccggacgccgccgtgtgcgcccgcgccatcaacgtcctgcactgcctgcacgagctccagcacaccgagctggcgcggagcgtggaggaggccatggagtccggggccctggcccgcctcaccggccccgcccaccgggcggccctggcctacctgctccaggtgagcgacgcctgcgcccaggaggcgaacctgagcctgtccctcagccagggcgtcctgcagtccctgctcccccagctgctgtactgccgcaagctccggctggacacgaaccagttccaggaccccgtgatggagctgctcgggagcgtgctgtccggcaaggactgccgcatccagaagatcagcctggccgagaaccagatctccaacaagggggccaaggccctcgcgcggagcctgctggtcaaccgctccctcaccagcctggacctgcggggcaactccatcgggccgcagggcgccaaggccctcgccgacgccctgaagatcaaccgcaccctgaccagcctctccctgcagggcaacacggtgcgggacgacggggcgcgcagcatggccgaggccctggcctccaaccggaccctcagcatgctgcacctccagaagaactccatcggccccatgggggcccagcgcatggcggacgccctcaagcagaaccggagcctgaaggagctgatgttcagctccaacagcatcggcgacgggggcgccaaggccctcgccgaggcgctgaaggtgaaccagggcctggagtccctcgacctgcagagcaactccatcagcgacgccggggtcgccgccctgatgggcgccctctgcaccaaccagaccctgctgtccctcagcctgcgcgagaactccatcagccccgagggggcgcaggccatcgcccacgccctgtgcgcgaactccacgctcaagaacctggacctgaccgccaacctcctgcacgaccagggcgcccgggccatcgccgtggcggtgcgcgagaaccgcaccctgaccagcctccacctccagtggaacttcatccaggccggcgccgcccaggccctggggcaggcgctgcagctgaaccggtccctgaccagcctcgacctgcaggagaacgccatcggcgacgacggggcctgcgccgtcgcccgcgcgctgaaggtgaacacggccctgaccgccctctacctccaggtggcctccatcggcgcgagcggggcccaggtcctgggcgaggccctggccgtgaaccggaccctggagatcctggacctccgcggcaacgccatcggggtggcgggcgccaaggccctggccaacgccctgaaggtcaactccagcctccggcgcctgaacctgcaggagaactccctcgggatggacggcgcgatctgcatcgccaccgccctgagcgggaaccaccggctgcagcacatcaacctccagggcaaccacatcggcgacagcggggcccgcatgatctccgaggccatcaagacgaacgcgcccacgtgcaccgtggagatgtga

SEQ ID NO: 9175 - RNA, 3339 nt, synthetic construct
  misc_feature 1..3339: note = derived and/or modified sequence opt2 fromNOD3__Homo_sapiens__EAW85351
  source 1..3339: mol_type = other RNA
atggagatggacgccccccgccccccctccctcgccgtccccggcgccgcctcccgccccggccgcctcctcgacggcggccacggccgccagcaggtccaggccctctcctcccagctcctcgaggtcatccccgactccatgcgcaagcaggaggtccgcaccggccgcgaggccggccagggccacggcaccggctcccccgccgagcaggtcaaggccctcatggacctcctcgccggcaagggctcccagggctcccaggccccccaggccctcgaccgcacccccgacgcccccctcggcccctgctccaacgactcccgcatccagcgccaccgcaaggccctcctctccaaggtcggcggcggccccgagctcggcggcccctggcaccgcctcgcctccctcctcctcgtcgagggcctcaccgacctccagctccgcgagcacgacttcacccaggtcgaggccacccgcggcggcggccaccccgcccgcaccgtcgccctcgaccgcctcttcctccccctctcccgcgtctccgtccccccccgcgtctccatcaccatcggcgtcgccggcatgggcaagaccaccctcgtccgccacttcgtccgcctctgggcccacggccaggtcggcaaggacttctccctcgtcctccccctcaccttccgcgacctcaacacccacgagaagctctgcgccgaccgcctcatctgctccgtcttcccccacgtcggcgagccctccctcgccgtcgccgtccccgcccgcgccctcctcatcctcgacggcctcgacgagtgccgcacccccctcgacttctccaacaccgtcgcctgcaccgaccccaagaaggagatccccgtcgaccacctcatcaccaacatcatccgcggcaacctcttccccgaggtctccatctggatcacctcccgcccctccgcctccggccagatccccggcggcctcgtcgaccgcatgaccgagatccgcggcttcaacgaggaggagatcaaggtctgcctcgagcagatgttccccgaggaccaggccctcctcggctggatgctctcccaggtccaggccgaccgcgccctctacctcatgtgcaccgtccccgccttctgccgcctcaccggcatggccctcggccacctctggcgctcccgcaccggcccccaggacgccgagctctggcccccccgcaccctctgcgagctctactcctggtacttccgcatggccctctccggcgagggccaggagaagggcaaggcctccccccgcatcgagcaggtcgcccacggcggccgcaagatggtcggcaccctcggccgcctcgccttccacggcctcctcaagaagaagtacgtcttctacgagcaggacatgaaggccttcggcgtcgacctcgccctcctccagggcgccccctgctcctgcttcctccagcgcgaggagaccctcgcctcctccgtcgcctactgcttcacccacctctccctccaggagttcgtcgccgccgcctactactacggcgcctcccgccgcgccatcttcgacctcttcaccgagtccggcgtctcctggccccgcctcggcttcctcacccacttccgctccgccgcccagcgcgccatgcaggccgaggacggccgcctcgacgtcttcctccgcttcctctccggcctcctctccccccgcgtcaacgccctcctcgccggctccctcctcgcccagggcgagcaccaggcctaccgcacccaggtcgccgagctcctccagggctgcctccgccccgacgccgccgtctgcgcccgcgccatcaacgtcctccactgcctccacgagctccagcacaccgagctcgcccgctccgtcgaggaggccatggagtccggcgccctcgcccgcctcaccggccccgcccaccgcgccgccctcgcctacctcctccaggtctccgacgcctgcgcccaggaggccaacctctccctctccctctcccagggcgtcctccagtccctcctcccccagctcctctactgccgcaagctccgcctcgacaccaaccagttccaggaccccgtcatggagctcctcggctccgtcctctccggcaaggactgccgcatccagaagatctccctcgccgagaaccagatctccaacaagggcgccaaggccctcgcccgctccctcctcgtcaaccgctccctcacctccctcgacctccgcggcaactccatcggcccccagggcgccaaggccctcgccgacgccctcaagatcaaccgcaccctcacctccctctccctccagggcaacaccgtccgcgacgacggcgcccgctccatggccgaggccctcgcctccaaccgcaccctctccatgctccacctccagaagaactccatcggccccatgggcgcccagcgcatggccgacgccctcaagcagaaccgctccctcaaggagctcatgttctcctccaactccatcggcgacggcggcgccaaggccctcgccgaggccctcaaggtcaaccagggcctcgagtccctcgacctccagtccaactccatctccgacgccggcgtcgccgccctcatgggcgccctctgcaccaaccagaccctcctctccctctccctccgcgagaactccatctcccccgagggcgcccaggccatcgcccacgccctctgcgccaactccaccctcaagaacctcgacctcaccgccaacctcctccacgaccagggcgcccgcgccatcgccgtcgccgtccgcgagaaccgcaccctcacctccctccacctccagtggaacttcatccaggccggcgccgcccaggccctcggccaggccctccagctcaaccgctccctcacctccctcgacctccaggagaacgccatcggcgacgacggcgcctgcgccgtcgcccgcgccctcaaggtcaacaccgccctcaccgccctctacctccaggtcgcctccatcggcgcctccggcgcccaggtcctcggcgaggccctcgccgtcaaccgcaccctcgagatcctcgacctccgcggcaacgccatcggcgtcgccggcgccaaggccctcgccaacgccctcaaggtcaactcctccctccgccgcctcaacctccaggagaactccctcggcatggacggcgccatctgcatcgccaccgccctctccggcaaccaccgcctccagcacatcaacctccagggcaaccacatcggcgactccggcgcccgcatgatctccgaggccatcaagaccaacgcccccacctgcaccgtcgagatgtga

SEQ ID NO: 9176 - RNA, 3339 nt, synthetic construct
  misc_feature 1..3339: note = derived and/or modified sequence opt3 fromNOD3__Homo_sapiens__EAW85351
  source 1..3339: mol_type = other RNA
atggagatggacgcccccagacctccaagcctggctgtgccgggcgcagcctccaggcccgggcggctccttgatggaggtcacggccgccagcaagtccaggcgctgtcttcacagttgttagaagttatccctgacagtatgcgaaagcaggaggtgcgtaccgggagagaagctggacaaggccatggtacagggagcccagccgagcaggtaaaagcactgatggatctactcgccggaaagggctcccagggctctcaggctccccaagcactggacaggactcctgatgccccacttgggccctgctcgaacgactcacggattcagcgccacagaaaagctctgttgagcaaggtgggaggtggccctgaactcgggggaccatggcataggctggccagtctgctcttagtcgagggcctgacggatcttcagttgcgggagcacgacttcacccaggtggaagcgacacgcggtgggggacatccggcacgaactgttgccctggatagactatttctccccctgtccagggtgtctgtccctccacgggtgagcataaccatcggcgtagctggcatggggaaaacaacccttgttcgtcacttcgtgcgcctgtgggcccacggacaagtcggtaaggacttttccttggtgctccccctgactttcagagatttaaatacacatgagaagctgtgtgcagacaggctcatttgctcagtgtttcctcacgtcggcgaaccaagtcttgctgttgccgtgcccgcgcgggccctgttgatcctagatgggctggacgagtgtcgaaccccgctcgacttcagcaacacggtagcatgcactgatcctaaaaaggagattcccgtggaccatctgatcaccaatataatccgcggaaacctttttccagaagtctctatttggatcacatccagaccttcagctagcggccagattcccggtgggctggtggataggatgactgagatccggggcttcaatgaagaggaaataaaagtttgtttggagcagatgtttccagaggaccaagccctcctgggatggatgttaagtcaggtgcaggctgatcgcgccctgtacctaatgtgcaccgtccccgcattctgtagactcacaggcatggccctggggcacctttggaggtctcgtaccggacctcaggacgctgaattgtggccaccgcggacgctgtgcgagctctattcctggtactttcgaatggcgctgagcggtgaaggccaagagaaggggaaagcatcgcccagaattgaacaggtggcccacggaggcaggaagatggtaggtactcttgggcgcctggctttccatggcttgctcaagaaaaagtatgtgttttacgagcaggatatgaaagccttcggagtggacctggcattactgcagggcgccccttgttcttgcttcctacaacgggaggaaacactcgcttcctcagtcgcctattgttttacccacctgagtcttcaggagttcgtggcagcggcttactattacggggccagcagaagggcaatctttgatttgttcactgaatccggagtctcttggccacgcctgggttttctcacacatttccgaagcgccgctcagcgggccatgcaggcagaggacggccgtctggatgtgtttttaagattcctgtcagggcttttgagtcccagggttaacgctctcctggccggatccctactggcgcaaggcgaacaccaggcctaccgcacccaggtggctgagctcctgcagggttgccttcggcctgacgcagccgtatgcgctagagccattaatgtcttgcattgtctgcacgagttacaacacacggaactcgcaaggagcgtggaggaagcgatggagtctggggccctggctcgacttaccggcccagcccatcgcgcagctctggcctatttgctccaggtttcagacgcatgcgcccaggaggctaacctgagtctaagcctgtcccaaggagtgctccagtctctgcttccccagttgctgtactgtcggaagttaagactcgatacaaatcagtttcaagacccggtcatggaactgcttggctcggtgctgagcgggaaagattgcaggatccagaagatctccctagcggagaaccagatttcaaataaaggagccaaggcactcgctcgtagtctgttggtaaaccgctctctgactagcttagacctccggggcaattccataggtcctcagggggccaaggccctggctgatgcacttaaaatcaacagaaccctgacatcattgagcctccaaggaaatactgtgagggacgatggcgcccgatctatggcggaagctctggcctccaaccggaccctaagtatgctgcaccttcagaagaacagcattggtccaatgggcgcacagcgcatggccgacgctctcaaacagaatagatctctgaaggagttgatgttctcctcaaacagtatcggggatggaggcgcaaaagccctggcggaagcgttaaaggttaatcaagggctcgagagcctggaccttcagtcgaactccatatctgatgccggagtcgcagccctgatgggcgctttgtgtacaaatcagaccctcctgagcctatcactgagggagaacagtatttcccccgaaggtgcccaagcaatcgctcatgccctttgcgctaattctactctcaagaacctggacttgacggccaatttactgcacgatcagggggcacgggctatcgccgtggctgtgcgagagaacagaacactcaccagcctgcaccttcagtggaattttattcaggcaggagccgcccaagctctgggccaggcgttgcagctaaaccgctccctgacttcactcgacctgcaggaaaatgcaatcggtgacgatggcgcctgtgctgtcgccagggcacttaaagttaacaccgccttaacagctctgtatctccaagtggcgagcattggggccagtggagcacaggtgttgggcgaggctctggccgtaaatcgtaccctcgaaatactggaccttcgggggaacgcaatcggagtcgccggcgctaaggccctggcgaacgcattgaaagttaattcttccctaagaaggctgaacctccaggagaatagcttaggtatggatggggccatttgcatcgctactgccctgtcgggaaaccatcgccttcagcacatcaatctgcaaggcaaccatattggtgactcaggcgctcgaatgatatctgaggcaatcaagacaaatgcccctacgtgtaccgttgaaatgtga

SEQ ID NO: 9177 - RNA, 3339 nt, synthetic construct
  misc_feature 1..3339: note = derived and/or modified sequence opt4 fromNOD3__Homo_sapiens__EAW85351
  source 1..3339: mol_type = other RNA
atggagatggacgcccccagaccccccagcctggccgtgcccggcgccgccagcagacccggcagactgctggacggcggccacggcagacagcaggtgcaggccctgagcagccagctgctggaggtgatccccgacagcatgagaaagcaggaggtgagaaccggcagagaggccggccagggccacggcaccggcagccccgccgagcaggtgaaggccctgatggacctgctggccggcaagggcagccagggcagccaggccccccaggccctggacagaacccccgacgcccccctgggcccctgcagcaacgacagcagaatccagagacacagaaaggccctgctgagcaaggtgggcggcggccccgagctgggcggcccctggcacagactggccagcctgctgctggtggagggcctgaccgacctgcagctgagagagcacgacttcacccaggtggaggccaccagaggcggcggccaccccgccagaaccgtggccctggacagactgttcctgcccctgagcagagtgagcgtgccccccagagtgagcatcaccatcggcgtggccggcatgggcaagaccaccctggtgagacacttcgtgagactgtgggcccacggccaggtgggcaaggacttcagcctggtgctgcccctgaccttcagagacctgaacacccacgagaagctgtgcgccgacagactgatctgcagcgtgttcccccacgtgggcgagcccagcctggccgtggccgtgcccgccagagccctgctgatcctggacggcctggacgagtgcagaacccccctggacttcagcaacaccgtggcctgcaccgaccccaagaaggagatccccgtggaccacctgatcaccaacatcatcagaggcaacctgttccccgaggtgagcatctggatcaccagcagacccagcgccagcggccagatccccggcggcctggtggacagaatgaccgagatcagaggcttcaacgaggaggagatcaaggtgtgcctggagcagatgttccccgaggaccaggccctgctgggctggatgctgagccaggtgcaggccgacagagccctgtacctgatgtgcaccgtgcccgccttctgcagactgaccggcatggccctgggccacctgtggagaagcagaaccggcccccaggacgccgagctgtggccccccagaaccctgtgcgagctgtacagctggtacttcagaatggccctgagcggcgagggccaggagaagggcaaggccagccccagaatcgagcaggtggcccacggcggcagaaagatggtgggcaccctgggcagactggccttccacggcctgctgaagaagaagtacgtgttctacgagcaggacatgaaggccttcggcgtggacctggccctgctgcagggcgccccctgcagctgcttcctgcagagagaggagaccctggccagcagcgtggcctactgcttcacccacctgagcctgcaggagttcgtggccgccgcctactactacggcgccagcagaagagccatcttcgacctgttcaccgagagcggcgtgagctggcccagactgggcttcctgacccacttcagaagcgccgcccagagagccatgcaggccgaggacggcagactggacgtgttcctgagattcctgagcggcctgctgagccccagagtgaacgccctgctggccggcagcctgctggcccagggcgagcaccaggcctacagaacccaggtggccgagctgctgcagggctgcctgagacccgacgccgccgtgtgcgccagagccatcaacgtgctgcactgcctgcacgagctgcagcacaccgagctggccagaagcgtggaggaggccatggagagcggcgccctggccagactgaccggccccgcccacagagccgccctggcctacctgctgcaggtgagcgacgcctgcgcccaggaggccaacctgagcctgagcctgagccagggcgtgctgcagagcctgctgccccagctgctgtactgcagaaagctgagactggacaccaaccagttccaggaccccgtgatggagctgctgggcagcgtgctgagcggcaaggactgcagaatccagaagatcagcctggccgagaaccagatcagcaacaagggcgccaaggccctggccagaagcctgctggtgaacagaagcctgaccagcctggacctgagaggcaacagcatcggcccccagggcgccaaggccctggccgacgccctgaagatcaacagaaccctgaccagcctgagcctgcagggcaacaccgtgagagacgacggcgccagaagcatggccgaggccctggccagcaacagaaccctgagcatgctgcacctgcagaagaacagcatcggccccatgggcgcccagagaatggccgacgccctgaagcagaacagaagcctgaaggagctgatgttcagcagcaacagcatcggcgacggcggcgccaaggccctggccgaggccctgaaggtgaaccagggcctggagagcctggacctgcagagcaacagcatcagcgacgccggcgtggccgccctgatgggcgccctgtgcaccaaccagaccctgctgagcctgagcctgagagagaacagcatcagccccgagggcgcccaggccatcgcccacgccctgtgcgccaacagcaccctgaagaacctggacctgaccgccaacctgctgcacgaccagggcgccagagccatcgccgtggccgtgagagagaacagaaccctgaccagcctgcacctgcagtggaacttcatccaggccggcgccgcccaggccctgggccaggccctgcagctgaacagaagcctgaccagcctggacctgcaggagaacgccatcggcgacgacggcgcctgcgccgtggccagagccctgaaggtgaacaccgccctgaccgccctgtacctgcaggtggccagcatcggcgccagcggcgcccaggtgctgggcgaggccctggccgtgaacagaaccctggagatcctggacctgagaggcaacgccatcggcgtggccggcgccaaggccctggccaacgccctgaaggtgaacagcagcctgagaagactgaacctgcaggagaacagcctgggcatggacggcgccatctgcatcgccaccgccctgagcggcaaccacagactgcagcacatcaacctgcagggcaaccacatcggcgacagcggcgccagaatgatcagcgaggccatcaagaccaacgcccccacctgcaccgtggagatgtga

SEQ ID NO: 9178 - RNA, 3339 nt, synthetic construct
  misc_feature 1..3339: note = derived and/or modified sequence opt5 fromNOD3__Homo_sapiens__EAW85351
  source 1..3339: mol_type = other RNA
atggagatggacgcccccagacctccgagcctggctgtgcccggcgccgcgtcccggcctgggcgcctcctggatggaggccacgggagacagcaagtccaggctctttctagccagctgctcgaagttatccccgactccatgcggaagcaggaggtgcgcaccggaagagaagccggccaagggcatggaacaggctctcctgccgaacaggtgaaagctctgatggatcttctggccggcaaggggagccagggatcccaggctccccaagccctcgaccggacgcctgatgcgccgctgggcccctgctctaacgacagccgcattcagagacaccggaaagccctgctctccaaggtcgggggaggccctgagcttgggggaccctggcatcgccttgctagcctgctcctggtggagggccttaccgatctgcagctcagagagcacgacttcacacaggttgaagccacccggggcgggggacatcctgctcgcacagtggccctggatagactgtttctccccctgtctcgggtctccgtgccgcctcgcgttagcatcaccattggcgtggcggggatgggaaaaacaacccttgtcagacacttcgtgcggctgtgggcccacggccaagtggggaaggacttttctctcgtcctgccccttacgttcagagatctgaatacccatgagaagctctgtgctgaccgcctgatctgctccgtttttcctcacgtgggagaacccagcctggccgtggctgtccccgcccgggccctcctgattcttgatggcctggacgagtgtagaacacctctcgacttctctaacaccgtggcttgcacagatccgaaaaaggagatccccgttgaccatctgatcaccaatattatccgcggcaacctttttcctgaagtgtccatttggatcacgagccggccctccgcgtctgggcagattcctggaggcctggtcgatagaatgacagagatccgcgggttcaatgaagaggaaattaaagtgtgtctcgagcagatgtttcccgaggaccaagccctgctgggatggatgctcagccaggttcaggctgatcgggccctgtaccttatgtgcaccgtgccggccttctgtagactgacaggcatggctctcgggcacctgtggcgctcccggaccggccctcaggacgccgaactgtggccccctagaaccctttgcgagctctatagctggtactttcgcatggcgctgtctggagaaggccaagagaaggggaaagctagcccccggatcgaacaggtcgcccacggaggcagaaagatggtggggacactgggacggctcgccttccatggcctgcttaagaaaaagtatgtcttttacgagcaggatatgaaggctttcggggtggacctggccctcctgcagggcgctccttgttcctgcttcctgcaacgcgaggaaacgcttgcctctagcgttgcgtattgttttacccacctctccctgcaggagttcgtggccgctgcctactattacggagcttctagacgggccatctttgatctgttcacagaaagcggcgtctcctggcccagactcgggtttctgacccatttccgcagcgcggcccagcgggctatgcaggccgaggacggaagacttgatgtgtttctgcgcttcctctctggcctgctgtccccgagagttaacgctctgctcgccgggagcctgctggcccaaggagaacaccaggcttaccggacacaggtggcggagctcctgcagggctgccttcgccctgacgccgctgtctgcgccagagccattaatgtgctgcattgtctccacgagctgcaacacaccgaactggctcggtctgtggaggaagccatggagtccggggcgcttgctcgcctcacgggccccgcccatagagccgctctggcctatctgctccaggttagcgacgcgtgcgctcaggaggccaacctgtccctttctctgagccaaggagtcctccagtccctgctgccccagcttctgtactgtcggaaactccgcctggatacaaatcagtttcaagaccctgtgatggaactcctgggctctgtgcttagcgggaaagattgcagaatccagaagatttccctggccgagaaccagatcagcaataaaggagctaaggccctcgctcggtctctgctggtcaaccgctcccttaccagcctggacctcagaggcaattctattgggccgcagggagccaaggcgctggccgatgctctcaaaatcaaccggaccctgacatcccttagcctgcaaggcaataccgtgagagacgatggggcccgctctatggctgaagccctcgccagcaaccggacactgtccatgctgcaccttcagaagaacagcatcggccccatgggagctcagagaatggcggacgccctgaaacagaatcgctctctcaaggagctgatgttctccagcaactccattggcgatgggggagctaaagccctcgccgaagctctgaaggttaatcaaggccttgagtctctggacctgcagagcaactccatctctgatgccggggtggcggctctcatgggagccctgtgtacgaatcagacccttctgagcctctccctgcgggagaactctattagccctgaaggcgcccaagctatcgcccatgcgctctgcgctaattccacactgaagaaccttgacctgaccgccaatctgctccacgatcagggcgccagagctattgccgtcgctgtgcgcgagaaccggacactgaccagccttcatctgcagtggaattttatccaggccggggcggcccaagctctcggacaggccctgcagctcaacagatctctgacgtcccttgacctgcaggaaaatgctatcggcgacgatggggcctgtgccgttgctcgcgcgctgaaagtgaacaccgccctcacagctctgtatcttcaagtcgccagcattggagcctctggcgctcaggtgctgggggaggccctcgcggttaatcggaccctggaaatcctcgacctgagaggaaacgctattggcgtggccggcgccaaggctcttgccaacgcgctgaaagtcaattccagcctgcggcgcctcaacctgcaggaaaattctcttgggatggatggagccatctgcattgctacagccctgtccggcaaccacagactccagcacatcaatctgcaagggaaccatattggagacagcggcgctcggatgatctccgaggccatcaagaccaatgctcccacgtgtacagtggagatgtga

SEQ ID NO: 9179 - protein, 1065 aa, synthetic construct; identical to SEQ ID NO: 9165
  REGION 1..1065: note = NOD3__Homo_sapiens__Q7RTR2

SEQ ID NO: 9180 - RNA, 3198 nt, synthetic construct
  misc_feature 1..3198: note = NOD3__Homo_sapiens__AAT48367
  source 1..3198: mol_type = other RNA
atgaggaagcaagaggtgcggacgggcagggaggccggccagggccacggtacgggctccccagccgagcaggtgaaagccctcatggatctgctggctgggaagggcagtcaaggctcccaggccccgcaggccctggataggacaccggatgccccgctggggccctgcagcaatgactcaaggatacagaggcaccgcaaggccctgctgagcaaggtgggaggtggcccggagctgggcggaccctggcacaggctggcctccctcctgctggtggagggcctgacggacctgcagctgagggaacacgacttcacacaggtggaggccacccgcgggggcgggcaccccgccaggaccgtcgccctggaccggctcttcctgcctctctcccgggtgtctgtcccaccccgggtctccatcactatcggggtggccggcatgggcaagaccaccctggtgaggcacttcgtccgcctctgggcccatgggcaggtcggcaaggacttctcgctggtgctgcctctgaccttccgggatctcaacacccacgagaagctgtgtgccgaccgactcatctgctcggtcttcccgcacgtcggggagcccagcctggcggtggcagtcccagccagggccctcctgatcctggacggcttggatgagtgcaggacgcctctggacttctccaacaccgtggcctgcacggacccaaagaaggagatcccggtggaccacctgatcaccaacatcatccgtggcaacctctttccggaagtttccatctggatcacctcccgtcccagtgcatctggccagatcccagggggcctggtggaccggatgacggagatccggggctttaacgaggaggagatcaaggtgtgtttggagcagatgttccccgaggaccaggcccttctgggctggatgctgagccaagtgcaggctgacagggccctgtacctgatgtgcaccgtcccagccttctgcaggctcacggggatggcgctaggccacctgtggcgcagcaggacggggccccaggatgcagagctgtggcccccgaggaccctgtgcgagctctactcatggtactttaggatggccctcagcggggaggggcaggagaagggcaaggcaagccctcgcatcgagcaggtggcccatggtggccgcaagatggtggggacattgggccgtctggccttccatgggctgctcaagaagaaatacgtgttttacgagcaagacatgaaggcgtttggtgtagacctcgctctgctgcagggcgccccgtgcagctgcttcctgcagagagaggagacgttggcatcgtcagtggcctactgcttcacccacctgtccctgcaggagtttgtggcagccgcgtattactatggcgcatccaggagggccatcttcgacctcttcactgagagcggcgtatcctggcccaggctgggcttcctcacgcatttcaggagcgcagcccagcgggccatgcaggcagaggacgggaggctggacgtgttcctgcgcttcctctccggcctcttgtctccgagggtcaatgccctcctggccggctccctgctggcccaaggcgagcaccaggcctaccggacccaggtggctgagctcctgcagggctgcctgcgccccgatgccgcagtctgtgcacgggccatcaacgtgttgcactgcctgcatgagctgcagcacactgagctggcccgcagcgtggaggaggccatggagagcggggccctggccaggctgaccggtcccgcgcaccgcgctgccctggcctacctcctgcaggtgtccgacgcctgtgcccaggaggccaacctgtccctgagcctcagccagggcgtccttcagagcctgctgccccagctgctctactgccggaagctcaggctggacaccaaccagttccaggaccccgtgatggagctgctgggcagcgtgctgagtgggaaggactgtcgcattcagaagatcagcttggcggagaaccagatcagtaacaaaggggccaaagctctggccagatccctcttggtcaacagaagtctgacctctctggacctccgcggtaactccattggaccacaaggggccaaggcgctggcagacgctttgaagatcaaccgcaccctgacctccctgagcctccagggcaacaccgttagggatgatggtgccaggtccatggctgaggccttggcctccaaccggaccctctccatgctgcacctgcagaagaacagcatcgggcccatgggagcccagcggatggcagatgccttgaagcagaacaggagtctgaaagagctcatgttctccagtaatagtattggtgatggaggtgccaaggccctggctgaggccctgaaggtgaaccagggcctggagagcctggacctgcagagcaattccatcagtgacgcaggagtggcagcactgatgggggccctctgcaccaaccagaccctcctcagcctcagccttcgagaaaactccatcagtcccgagggagcccaggccatcgctcatgccctctgcgccaacagcaccctgaagaacctggacctgacagccaacctcctccacgaccagggtgcccgggccatcgcagtggcagtgagagaaaaccgcaccctcacctcccttcacctgcagtggaacttcatccaggccggcgctgcccaggccctgggacaagcactacagctcaacaggagcctcaccagcttagatttacaggagaacgccatcggggatgacggagcgtgtgcggtggcccgtgcactgaaggtcaacacagccctcactgctctctatctccaggtggcctcaattggtgcttcaggcgcccaggtgctaggggaagccttggctgtgaacagaaccttggagattctcgacttaagaggaaatgccattggggtggctggagccaaagccctggcaaatgctctgaaggtaaactcaagtctccggagactcaatcttcaagagaattctctggggatggacggggcgatatgcattgccacagcactgtctggaaaccacaggctccagcatatcaatctccagggaaaccacattggggactccggggccaggatgatctcagaggccatcaagacaaatgctcccacgtgcactgttgaaatgtga

SEQ ID NO: 9181 - RNA, 3198 nt, synthetic construct; identical to SEQ ID NO: 9167
  misc_feature 1..3198: note = derived and/or modified sequence opt1 fromNOD3__Homo_sapiens__AAT48367
  source 1..3198: mol_type = other RNA

SEQ ID NO: 9182 - RNA, 3198 nt, synthetic construct; identical to SEQ ID NO: 9168
  misc_feature 1..3198: note = derived and/or modified sequence opt2 fromNOD3__Homo_sapiens__AAT48367
  source 1..3198: mol_type = other RNA

SEQ ID NO: 9183 - RNA, 3198 nt, synthetic construct; identical to SEQ ID NO: 9169
  misc_feature 1..3198: note = derived and/or modified sequence opt3 fromNOD3__Homo_sapiens__AAT48367
  source 1..3198: mol_type = other RNA

SEQ ID NO: 9184 - RNA, 3198 nt, synthetic construct; identical to SEQ ID NO: 9170
  misc_feature 1..3198: note = derived and/or modified sequence opt4 fromNOD3__Homo_sapiens__AAT48367
  source 1..3198: mol_type = other RNA

SEQ ID NO: 9185 - RNA, 3198 nt, synthetic construct; identical to SEQ ID NO: 9171
  misc_feature 1..3198: note = derived and/or modified sequence opt5 fromNOD3__Homo_sapiens__AAT48367
  source 1..3198: mol_type = other RNA

SEQ ID NO: 9186 - protein, 1044 aa, synthetic construct
  REGION 1..1044: note = PI3K__Homo_sapiens__O00329
MPPGVDCPMEFWTKEENQSVVVDFLLPTGVYLNFPVSRNANLSTIKQLLWHRAQYEPLFHMLSGPEAYVFTCINQTAEQQELEDEQRRLCDVQPFLPVLRLVAREGDRVKKLINSQISLLIGKGLHEFDSLCDPEVNDFRAKMCQFCEEAAARRQQLGWEAWLQYSFPLQLEPSAQTWGPGTLRLPNRALLVNVKFEGSEESFTFQVSTKDVPLALMACALRKKATVFRQPLVEQPEDYTLQVNGRHEYLYGSYPLCQFQYICSCLHSGLTPHLTMVHSSSILAMRDEQSNPAPQVQKPRAKPPPIPAKKPSSVSLWSLEQPFRIELIQGSKVNADERMKLVVQAGLFHGNEMLCKTVSSSEVSVCSEPVWKQRLEFDINICDLPRMARLCFALYAVIEKAKKARSTKKKSKKADCPIAWANLMLFDYKDQLKTGERCLYMWPSVPDEKGELLNPTGTVRSNPNTDSAAALLICLPEVAPHPVYYPALEKILELGRHSECVHVTEEEQLQLREILERRGSGELYEHEKDLVWKLRHEVQEHFPEALARLLLVTKWNKHEDVAQMLYLLCSWPELPVLSALELLDFSFPDCHVGSFAIKSLRKLTDDELFQYLLQLVQVLKYESYLDCELTKFLLDRALANRKIGHFLFWHLRSEMHVPSVALRFGLILEAYCRGSTHHMKVLMKQGEALSKLKALNDFVKLSSQKTPKPQTKELMHLCMRQEAYLEALSHLQSPLDPSTLLAEVCVEQCTFMDSKMKPLWIMYSNEEAGSGGSVGIIFKNGDDLRQDMLTLQMIQLMDVLWKQEGLDLRMTPYGCLPTGDRTGLIEVVLRSDTIANIQLNKSNMAATAAFNKDALLNWLKSKNPGEALDRAIEEFTLSCAGYCVATYVLGIGDRHSDNIMIRESGQLFHIDFGHFLGNFKTKFGINRERVPFILTYDFVHVIQQGKTNNSEKFERFRGYCERAYTILRRHGLLFLHLFALMRAAGLPELSCSKDIQYLKDSLALGKTEEEALKHFRVKFNEALRESWKTKVNWLAHNVSKDNRQ

SEQ ID NO: 9187 - RNA, 3135 nt, synthetic construct
  misc_feature 1..3135: note = PI3K__Homo_sapiens__AAI32920
  source 1..3135: mol_type = other RNA
atgccccctggggtggactgccccatggaattctggaccaaggaggagaatcagagcgttgtggttgacttcctgctgcccacaggggtctacctgaacttccctgtgtcccgcaatgccaacctcagcaccatcaagcagctgctgtggcaccgcgcccagtatgagccgctcttccacatgctcagtggccccgaggcctatgtgttcacctgcatcaaccagacagcggagcagcaagagctggaggacgagcaacggcgtctgtgtgacgtgcagcccttcctgcccgtcctgcgcctggtggcccgtgagggcgaccgcgtgaagaagctcatcaactcacagatcagcctcctcatcggcaaaggcctccacgagtttgactccttgtgcgacccagaagtgaacgactttcgcgccaagatgtgccaattctgcgaggaggcggccgcccgccggcagcagctgggctgggaggcctggctgcagtacagtttccccctgcagctggagccctcggctcaaacctgggggcctggtaccctgcggctcccgaaccgggcccttctggtcaacgttaagtttgagggcagcgaggagagcttcaccttccaggtgtccaccaaggacgtgccgctggcgctgatggcctgtgccctgcggaagaaggccacagtgttccggcagccgctggtggagcagccggaagactacacgctgcaggtgaacggcaggcatgagtacctgtatggcagctacccgctctgccagttccagtacatctgcagctgcctgcacagtgggttgacccctcacctgaccatggtccattcctcctccatcctcgccatgcgggatgagcagagcaaccctgccccccaggtccagaaaccgcgtgccaaaccacctcccattcctgcgaagaagccttcctctgtgtccctgtggtccctggagcagccgttccgcatcgagctcatccagggcagcaaagtgaacgccgacgagcggatgaagctggtggtgcaggccgggcttttccacggcaacgagatgctgtgcaagacggtgtccagctcggaggtgagcgtgtgctcggagcccgtgtggaagcagcggctggagttcgacatcaacatctgcgacctgccccgcatggcccgtctctgctttgcgctgtacgccgtgatcgagaaagccaagaaggctcgctccaccaagaagaagtccaagaaggcggactgccccattgcctgggccaacctcatgctgtttgactacaaggaccagcttaagaccggggaacgctgcctctacatgtggccctccgtcccagatgagaagggcgagctgctgaaccccacgggcactgtgcgcagtaaccccaacacggatagcgccgctgccctgctcatctgcctgcccgaggtggccccgcaccccgtgtactaccccgccctggagaagatcttggagctggggcgacacagcgagtgtgtgcatgtcaccgaggaggagcagctgcagctgcgggaaatcctggagcggcgggggtctggggagctgtatgagcacgagaaggacctggtgtggaagctgcggcatgaagtccaggagcacttcccggaggcgctagcccggctgctgctggtcaccaagtggaacaagcatgaggatgtggcccagatgctctacctgctgtgctcctggccggagctgcccgtcctgagcgccctggagctgctagacttcagcttccccgattgccacgtaggctccttcgccatcaagtcgctgcggaaactgacggacgatgagctgttccagtacctgctgcagctggtgcaggtgctcaagtacgagtcctacctggactgcgagctgaccaaattcctgctggaccgggccctggccaaccgcaagatcggccacttccttttctggcacctccgctccgagatgcacgtgccgtcggtggccctgcgcttcggcctcatcctggaggcctactgcaggggcagcacccaccacatgaaggtgctgatgaagcagggggaagcactgagcaaactgaaggccctgaatgacttcgtcaagctgagctctcagaagacccccaagccccagaccaaggagctgatgcacttgtgcatgcggcaggaggcctacctagaggccctctcccacctgcagtccccactcgaccccagcaccctgctggctgaagtctgcgtggagcagtgcaccttcatggactccaagatgaagcccctgtggatcatgtacagcaacgaggaggcaggcagcggcggcagcgtgggcatcatctttaagaacggggatgacctccggcaggacatgctgaccctgcagatgatccagctcatggacgtcctgtggaagcaggaggggctggacctgaggatgaccccctatggctgcctccccaccggggaccgcacaggcctcattgaggtggtactccgttcagacaccatcgccaacatccaactcaacaagagcaacatggcagccacagccgccttcaacaaggatgccctgctcaactggctgaagtccaagaacccgggggaggccctggatcgagccattgaggagttcaccctctcctgtgctggctattgtgtggccacatatgtgctgggcattggcgatcggcacagcgacaacatcatgatccgagagagtgggcagctgttccacattgattttggccactttctggggaatttcaagaccaagtttggaatcaaccgcgagcgtgtcccattcatcctcacctacgactttgtccatgtgattcagcaggggaagactaataatagtgagaaatttgaacggttccggggctactgtgaaagggcctacaccatcctgcggcgccacgggcttctcttcctccacctctttgccctgatgcgggcggcaggcctgcctgagctcagctgctccaaagacatccagtatctcaaggactccctggcactggggaaaacagaggaggaggcactgaagcacttccgagtgaagtttaacgaagccctccgtgagagctggaaaaccaaagtgaactggctggcccacaacgtgtccaaagacaacaggcagtag

SEQ ID NO: 9188 - RNA, 3135 nt, synthetic construct
  misc_feature 1..3135: note = derived and/or modified sequence opt1 fromPI3K__Homo_sapiens__AAI32920
  source 1..3135: mol_type = other RNA
atgcccccgggcgtggactgccccatggagttctggaccaaggaggagaaccagagcgtcgtggtggacttcctgctccccaccggggtctacctgaacttccccgtgtcccgcaacgccaacctgagcacgatcaagcagctcctgtggcaccgggcccagtacgagccgctgttccacatgctctccggccccgaggcgtacgtgttcacgtgcatcaaccagaccgccgagcagcaggagctggaggacgagcagcgccggctgtgcgacgtccagcccttcctccccgtgctgcgcctggtggcccgggagggggaccgcgtcaagaagctcatcaacagccagatctccctgctgatcggcaaggggctccacgagttcgacagcctgtgcgacccggaggtgaacgacttccgggccaagatgtgccagttctgcgaggaggccgcggcccgccggcagcagctgggctgggaggcctggctccagtactccttccccctgcagctggagcccagcgcccagacctggggccccgggaccctccgcctgccgaaccgggcgctgctcgtgaacgtcaagttcgagggctccgaggagagcttcaccttccaggtgtccaccaaggacgtgcccctggccctgatggcctgcgccctccgcaagaaggccaccgtcttccggcagcccctggtggagcagcccgaggactacacgctccaggtgaacgggcgccacgagtacctctacggcagctacccgctgtgccagttccagtacatctgctcctgcctgcacagcgggctcacgccccacctgaccatggtccactccagctccatcctggcgatgcgggacgagcagagcaaccccgcgccccaggtgcagaagccgcgcgccaagcccccgcccatccccgccaagaagccctccagcgtgagcctctggtccctggagcagcccttccggatcgagctgatccagggcagcaaggtcaacgccgacgagcgcatgaagctcgtggtgcaggccggcctgttccacgggaacgagatgctgtgcaagaccgtctccagctccgaggtgagcgtctgctccgagcccgtgtggaagcagcggctcgagttcgacatcaacatctgcgacctgccgcgcatggcccggctgtgcttcgccctctacgccgtgatcgagaaggccaagaaggcgcgcagcaccaagaagaagtccaagaaggccgactgccccatcgcctgggccaacctgatgctgttcgactacaaggaccagctcaagaccggcgagcgctgcctgtacatgtggcccagcgtcccggacgagaagggggagctgctgaaccccaccggcaccgtgcggtccaaccccaacacggacagcgccgcggccctcctgatctgcctgcccgaggtggccccgcaccccgtctactaccccgccctcgagaagatcctggagctgggccgccactccgagtgcgtgcacgtgaccgaggaggagcagctccagctgcgggagatcctggagcgccgggggagcggcgagctctacgagcacgagaaggacctggtctggaagctgcgccacgaggtgcaggagcacttccccgaggcgctcgcccggctgctgctcgtgaccaagtggaacaagcacgaggacgtcgcccagatgctgtacctgctctgctcctggccggagctgcccgtgctgagcgccctcgagctgctggacttctccttccccgactgccacgtggggagcttcgccatcaagtccctccgcaagctgaccgacgacgagctgttccagtacctcctgcagctggtccaggtgctcaagtacgagagctacctggactgcgagctgacgaagttcctcctggaccgggcgctggccaaccgcaagatcggccacttcctcttctggcacctccggagcgagatgcacgtgccctccgtcgccctgcgcttcgggctgatcctggaggcctactgccggggcagcacccaccacatgaaggtgctgatgaagcagggcgaggccctctccaagctgaaggcgctgaacgacttcgtgaagctcagctcccagaagaccccgaagccccagaccaaggagctgatgcacctgtgcatgcgccaggaggcctacctcgaggccctgagccacctccagagccccctggacccctccacgctgctggccgaggtctgcgtggagcagtgcaccttcatggactccaagatgaagccgctctggatcatgtacagcaacgaggaggccgggtccggcgggagcgtgggcatcatcttcaagaacggggacgacctgcggcaggacatgctgaccctccagatgatccagctgatggacgtcctgtggaagcaggagggcctcgacctgcgcatgaccccctacggctgcctgcccacgggggaccggaccggcctcatcgaggtggtgctgcgctccgacaccatcgcgaacatccagctgaacaagagcaacatggccgccaccgccgcgttcaacaaggacgccctcctgaactggctgaagtccaagaaccccggggaggccctcgaccgggccatcgaggagttcacgctgagctgcgccggctactgcgtcgcgacctacgtgctggggatcggcgaccgccactccgacaacatcatgatccgcgagagcggccagctgttccacatcgacttcgggcacttcctgggcaacttcaagaccaagttcgggatcaaccgggagcgcgtgccgttcatcctgacctacgacttcgtccacgtgatccagcagggcaagacgaacaacagcgagaagttcgagcggttccgcggctactgcgagcgggcctacaccatcctccgccggcacgggctgctgttcctccacctgttcgccctgatgcgcgccgccggcctccccgagctgtcctgcagcaaggacatccagtacctgaaggactccctcgcgctggggaagaccgaggaggaggccctgaagcacttccgggtgaagttcaacgaggccctccgcgagagctggaagaccaaggtcaactggctggcccacaacgtgtccaaggacaaccggcagtga

SEQ ID NO: 9189 - RNA, 3135 nt, synthetic construct
  misc_feature 1..3135: note = derived and/or modified sequence opt2 fromPI3K__Homo_sapiens__AAI32920
  source 1..3135: mol_type = other RNA
atgccccccggcgtcgactgccccatggagttctggaccaaggaggagaaccagtccgtcgtcgtcgacttcctcctccccaccggcgtctacctcaacttccccgtctcccgcaacgccaacctctccaccatcaagcagctcctctggcaccgcgcccagtacgagcccctcttccacatgctctccggccccgaggcctacgtcttcacctgcatcaaccagaccgccgagcagcaggagctcgaggacgagcagcgccgcctctgcgacgtccagcccttcctccccgtcctccgcctcgtcgcccgcgagggcgaccgcgtcaagaagctcatcaactcccagatctccctcctcatcggcaagggcctccacgagttcgactccctctgcgaccccgaggtcaacgacttccgcgccaagatgtgccagttctgcgaggaggccgccgcccgccgccagcagctcggctgggaggcctggctccagtactccttccccctccagctcgagccctccgcccagacctggggccccggcaccctccgcctccccaaccgcgccctcctcgtcaacgtcaagttcgagggctccgaggagtccttcaccttccaggtctccaccaaggacgtccccctcgccctcatggcctgcgccctccgcaagaaggccaccgtcttccgccagcccctcgtcgagcagcccgaggactacaccctccaggtcaacggccgccacgagtacctctacggctcctaccccctctgccagttccagtacatctgctcctgcctccactccggcctcaccccccacctcaccatggtccactcctcctccatcctcgccatgcgcgacgagcagtccaaccccgccccccaggtccagaagccccgcgccaagcccccccccatccccgccaagaagccctcctccgtctccctctggtccctcgagcagcccttccgcatcgagctcatccagggctccaaggtcaacgccgacgagcgcatgaagctcgtcgtccaggccggcctcttccacggcaacgagatgctctgcaagaccgtctcctcctccgaggtctccgtctgctccgagcccgtctggaagcagcgcctcgagttcgacatcaacatctgcgacctcccccgcatggcccgcctctgcttcgccctctacgccgtcatcgagaaggccaagaaggcccgctccaccaagaagaagtccaagaaggccgactgccccatcgcctgggccaacctcatgctcttcgactacaaggaccagctcaagaccggcgagcgctgcctctacatgtggccctccgtccccgacgagaagggcgagctcctcaaccccaccggcaccgtccgctccaaccccaacaccgactccgccgccgccctcctcatctgcctccccgaggtcgccccccaccccgtctactaccccgccctcgagaagatcctcgagctcggccgccactccgagtgcgtccacgtcaccgaggaggagcagctccagctccgcgagatcctcgagcgccgcggctccggcgagctctacgagcacgagaaggacctcgtctggaagctccgccacgaggtccaggagcacttccccgaggccctcgcccgcctcctcctcgtcaccaagtggaacaagcacgaggacgtcgcccagatgctctacctcctctgctcctggcccgagctccccgtcctctccgccctcgagctcctcgacttctccttccccgactgccacgtcggctccttcgccatcaagtccctccgcaagctcaccgacgacgagctcttccagtacctcctccagctcgtccaggtcctcaagtacgagtcctacctcgactgcgagctcaccaagttcctcctcgaccgcgccctcgccaaccgcaagatcggccacttcctcttctggcacctccgctccgagatgcacgtcccctccgtcgccctccgcttcggcctcatcctcgaggcctactgccgcggctccacccaccacatgaaggtcctcatgaagcagggcgaggccctctccaagctcaaggccctcaacgacttcgtcaagctctcctcccagaagacccccaagccccagaccaaggagctcatgcacctctgcatgcgccaggaggcctacctcgaggccctctcccacctccagtcccccctcgacccctccaccctcctcgccgaggtctgcgtcgagcagtgcaccttcatggactccaagatgaagcccctctggatcatgtactccaacgaggaggccggctccggcggctccgtcggcatcatcttcaagaacggcgacgacctccgccaggacatgctcaccctccagatgatccagctcatggacgtcctctggaagcaggagggcctcgacctccgcatgaccccctacggctgcctccccaccggcgaccgcaccggcctcatcgaggtcgtcctccgctccgacaccatcgccaacatccagctcaacaagtccaacatggccgccaccgccgccttcaacaaggacgccctcctcaactggctcaagtccaagaaccccggcgaggccctcgaccgcgccatcgaggagttcaccctctcctgcgccggctactgcgtcgccacctacgtcctcggcatcggcgaccgccactccgacaacatcatgatccgcgagtccggccagctcttccacatcgacttcggccacttcctcggcaacttcaagaccaagttcggcatcaaccgcgagcgcgtccccttcatcctcacctacgacttcgtccacgtcatccagcagggcaagaccaacaactccgagaagttcgagcgcttccgcggctactgcgagcgcgcctacaccatcctccgccgccacggcctcctcttcctccacctcttcgccctcatgcgcgccgccggcctccccgagctctcctgctccaaggacatccagtacctcaaggactccctcgccctcggcaagaccgaggaggaggccctcaagcacttccgcgtcaagttcaacgaggccctccgcgagtcctggaagaccaaggtcaactggctcgcccacaacgtctccaaggacaaccgccagtga

SEQ ID NO: 9190 - RNA, 3135 nt, synthetic construct
  misc_feature 1..3135: note = derived and/or modified sequence opt3 fromPI3K__Homo_sapiens__AAI32920
  source 1..3135: mol_type = other RNA
atgccccctggcgtggactgcccaatggagttctggaccaaggaagagaaccagagcgtcgttgtggattttctgctcccgacaggggtataccttaatttccccgtgtccagaaacgccaatctgtctactatcaaacaattgttatggcacagggctcagtatgaacctctgtttcatatgctatcaggaccagaggcatacgtcttcacgtgtattaaccagaccgccgaacagcaagagctcgaggacgaacagcggcgcctgtgcgatgtgcagccctttcttcctgttctgcgattggtggcgcgtgagggtgacagagtcaagaaactcataaatagtcagatcagcctgctgattggcaaggggctccacgagttcgattccttatgtgacccagaggtgaacgattttagggctaaaatgtgccaattctgtgaggaagccgcagcccggcgccagcagctgggatgggaggcttggcttcagtattcttttcccttgcaactggaaccttcggcacagacatggggcccaggtactctaagactcccgaatagggccctgcttgtaaacgttaagttcgaggggtcagaagagagctttaccttccaggtgagtacaaaggacgtccccctggctttgatggcctgcgcgctccggaaaaaggcaaccgtgtttcgccaacctctggtggagcagccagaagattacactttacaggtcaatggacgacatgagtatctgtacggctcctatcccctctgtcagttccaatacatctgctcttgtcttcacagcggcctgacacctcatttgaccatggttcactcctcaagtattctagccatgagagacgaacagagcaacccagctccccaggtgcagaaaccgagggccaagcctcccccaatccctgctaaaaagccctcttccgtatcactgtggagcctcgagcaaccattccggatagaactgatccaggggagtaaggtgaatgcagatgagcgtatgaaacttgtcgtgcaggccggactgtttcacggtaacgagatgttgtgcaagacggtttcttccagcgaagtgtcggtctgttctgagcccgtgtggaaacagcgcctcgagttcgacattaatatctgcgatctgcctagaatggcgaggttatgctttgccctgtacgcagtaattgaaaaggctaaaaaggcccggtccactaaaaagaagagtaaaaaggctgactgtccaatcgcctgggcaaacctaatgctgttcgactataaagatcaactcaagaccggcgaacgatgcctttacatgtggccgtcagttcccgacgagaaaggggagttgctgaatcctacaggaactgtgcgcagcaacccaaacaccgattccgccgctgcgctcctgatatgtcttcccgaagtcgcacctcatccagtgtattaccccgccctggagaagattttggaactcggcagacactctgagtgcgtccatgtgacagaggaagaacagctgcagttaagggaaatcctggagcggcgcggtagcggggaactatatgagcacgagaaggacctcgtttggaaactgagacacgaagtgcaggagcattttccggaagctcttgccaggttgctgctcgtaaccaagtggaataaacacgaggatgtcgcacaaatgctgtacttactgtgttcatggcctgaacttccagtgttgagtgccctcgagctgctagacttctcctttcccgattgccatgttggcagcttcgctattaagtctctgcgtaaactcacggacgatgagctgtttcagtatcttttgcagctggtgcaagtcttaaagtacgaatcatacctcgactgtgagctgactaagttccttctggatcgggccttggcaaaccgaaaaatcggacactttctcttctggcatctgagaagtgaaatgcacgtgcctagcgtagcgctaaggtttggcctgatcctcgaggcttattgccgcgggtccacacaccatatgaaggtgctgatgaaacagggagaagccctttctaagttgaaagcactgaatgacttcgttaagttatcgagccagaagacccccaaaccacagactaaggagctcatgcacctgtgtatgcggcaagaggcctaccttgaagctctgtcccatctacagtcacctctcgaccccagtacactgttggccgaggtctgcgtggaacagtgtaccttcatggattctaaaatgaagccactgtggattatgtatagcaacgaggaggcaggttccggcgggtcagtgggaataatctttaaaaatggcgacgatttaagacaggacatgctcacgctgcaaatgattcagcttatggatgtcctgtggaagcaggaaggtttggacctcaggatgaccccgtacgggtgcctgcctacaggcgatcgcactggactaatcgaggttgtgctgcgaagcgacaccatagctaacattcagcttaataaatctaacatggccgcgacagccgctttcaataaggatgcactcctgaactggttgaagtccaaaaatcccggcgaagccctggaccgggctatcgaggaatttactttaagttgcgccgggtattgtgtggcaacctacgtactcggaatcggtgatcgtcacagcgacaacattatgatcagagagtctggccaactgttccacattgattttgggcatttccttggaaattttaagacaaaattcggcataaacagggagcgcgtcccatttatcctgacctatgacttcgtgcacgttattcagcagggtaagactaataactccgaaaaatttgagcggttcagagggtactgcgaaagggcgtacacgatcttgcgacgccatggcctcctgtttctacacctgttcgcccttatgcgggctgccggactccccgagctgtcatgtagtaaggacatccaatatttgaaggatagcttagcactgggcaaaacagaagaggaggctctcaagcatttcagagtgaaatttaacgaagccctgagggagtcgtggaagaccaaagtcaattggcttgcacacaacgtgtccaaggacaatcgtcagtga

SEQ ID NO: 9191 - RNA, 3135 nt, synthetic construct
  misc_feature 1..3135: note = derived and/or modified sequence opt4 fromPI3K__Homo_sapiens__AAI32920
  source 1..3135: mol_type = other RNA
atgccccccggcgtggactgccccatggagttctggaccaaggaggagaaccagagcgtggtggtggacttcctgctgcccaccggcgtgtacctgaacttccccgtgagcagaaacgccaacctgagcaccatcaagcagctgctgtggcacagagcccagtacgagcccctgttccacatgctgagcggccccgaggcctacgtgttcacctgcatcaaccagaccgccgagcagcaggagctggaggacgagcagagaagactgtgcgacgtgcagcccttcctgcccgtgctgagactggtggccagagagggcgacagagtgaagaagctgatcaacagccagatcagcctgctgatcggcaagggcctgcacgagttcgacagcctgtgcgaccccgaggtgaacgacttcagagccaagatgtgccagttctgcgaggaggccgccgccagaagacagcagctgggctgggaggcctggctgcagtacagcttccccctgcagctggagcccagcgcccagacctggggccccggcaccctgagactgcccaacagagccctgctggtgaacgtgaagttcgagggcagcgaggagagcttcaccttccaggtgagcaccaaggacgtgcccctggccctgatggcctgcgccctgagaaagaaggccaccgtgttcagacagcccctggtggagcagcccgaggactacaccctgcaggtgaacggcagacacgagtacctgtacggcagctaccccctgtgccagttccagtacatctgcagctgcctgcacagcggcctgaccccccacctgaccatggtgcacagcagcagcatcctggccatgagagacgagcagagcaaccccgccccccaggtgcagaagcccagagccaagcccccccccatccccgccaagaagcccagcagcgtgagcctgtggagcctggagcagcccttcagaatcgagctgatccagggcagcaaggtgaacgccgacgagagaatgaagctggtggtgcaggccggcctgttccacggcaacgagatgctgtgcaagaccgtgagcagcagcgaggtgagcgtgtgcagcgagcccgtgtggaagcagagactggagttcgacatcaacatctgcgacctgcccagaatggccagactgtgcttcgccctgtacgccgtgatcgagaaggccaagaaggccagaagcaccaagaagaagagcaagaaggccgactgccccatcgcctgggccaacctgatgctgttcgactacaaggaccagctgaagaccggcgagagatgcctgtacatgtggcccagcgtgcccgacgagaagggcgagctgctgaaccccaccggcaccgtgagaagcaaccccaacaccgacagcgccgccgccctgctgatctgcctgcccgaggtggccccccaccccgtgtactaccccgccctggagaagatcctggagctgggcagacacagcgagtgcgtgcacgtgaccgaggaggagcagctgcagctgagagagatcctggagagaagaggcagcggcgagctgtacgagcacgagaaggacctggtgtggaagctgagacacgaggtgcaggagcacttccccgaggccctggccagactgctgctggtgaccaagtggaacaagcacgaggacgtggcccagatgctgtacctgctgtgcagctggcccgagctgcccgtgctgagcgccctggagctgctggacttcagcttccccgactgccacgtgggcagcttcgccatcaagagcctgagaaagctgaccgacgacgagctgttccagtacctgctgcagctggtgcaggtgctgaagtacgagagctacctggactgcgagctgaccaagttcctgctggacagagccctggccaacagaaagatcggccacttcctgttctggcacctgagaagcgagatgcacgtgcccagcgtggccctgagattcggcctgatcctggaggcctactgcagaggcagcacccaccacatgaaggtgctgatgaagcagggcgaggccctgagcaagctgaaggccctgaacgacttcgtgaagctgagcagccagaagacccccaagccccagaccaaggagctgatgcacctgtgcatgagacaggaggcctacctggaggccctgagccacctgcagagccccctggaccccagcaccctgctggccgaggtgtgcgtggagcagtgcaccttcatggacagcaagatgaagcccctgtggatcatgtacagcaacgaggaggccggcagcggcggcagcgtgggcatcatcttcaagaacggcgacgacctgagacaggacatgctgaccctgcagatgatccagctgatggacgtgctgtggaagcaggagggcctggacctgagaatgaccccctacggctgcctgcccaccggcgacagaaccggcctgatcgaggtggtgctgagaagcgacaccatcgccaacatccagctgaacaagagcaacatggccgccaccgccgccttcaacaaggacgccctgctgaactggctgaagagcaagaaccccggcgaggccctggacagagccatcgaggagttcaccctgagctgcgccggctactgcgtggccacctacgtgctgggcatcggcgacagacacagcgacaacatcatgatcagagagagcggccagctgttccacatcgacttcggccacttcctgggcaacttcaagaccaagttcggcatcaacagagagagagtgcccttcatcctgacctacgacttcgtgcacgtgatccagcagggcaagaccaacaacagcgagaagttcgagagattcagaggctactgcgagagagcctacaccatcctgagaagacacggcctgctgttcctgcacctgttcgccctgatgagagccgccggcctgcccgagctgagctgcagcaaggacatccagtacctgaaggacagcctggccctgggcaagaccgaggaggaggccctgaagcacttcagagtgaagttcaacgaggccctgagagagagctggaagaccaaggtgaactggctggcccacaacgtgagcaaggacaacagacagtga

SEQ ID NO: 9192 - RNA, 3135 nt, synthetic construct
  misc_feature 1..3135: note = derived and/or modified sequence opt5 fromPI3K__Homo_sapiens__AAI32920
  source 1..3135: mol_type = other RNA
atgccccctggcgtggactgcccgatggagttctggaccaaggaagagaaccagagcgtcgttgtggattttctgctccccacaggggtgtacctgaatttccctgtctccagaaacgccaatctttctacgatcaaacaactgctctggcaccgggctcagtatgaacccctgtttcatatgcttagcggacctgaggcctacgtgttcacctgtattaaccagacagcggaacagcaagagctggaggacgaacagcgcagactctgcgatgttcagccctttctgcctgtgctgcggctcgtcgctcgcgagggcgacagagtgaagaaactgatcaattcccagatttctcttctgatcgggaagggactccacgagttcgatagcctgtgtgacccggaggttaacgattttcgggccaaaatgtgccaattctgtgaggaagccgctgcccgcagacagcagcttggctgggaggcttggctgcagtattcctttcccctccaactggaaccttctgcccagacctgggggcccggaacactgcggctccctaatcgcgcgctgcttgtgaacgtcaagttcgagggcagcgaagagtcctttaccttccaggtgagcacaaaggacgtgcccctggccctcatggcttgcgccctgagaaagaaggctaccgtctttcggcaaccgcttgttgagcagcctgaagattacacgctccaggtgaatggccgccatgagtatctgtacgggtcttatcccctgtgtcagttccaatacatttgctcctgtctgcacagcggactcacccctcatctgacaatggtgcactcttccagcatccttgccatgagagacgaacagtctaaccccgcgccccaggtccagaaacctcgggccaagccgccccctatccccgctaaaaagccttccagcgtgtccctgtggtctctcgagcaacccttccgcattgaactgatccagggcagcaaggttaatgccgatgagagaatgaaacttgtggtccaggctgggctgtttcacggaaacgagatgctctgcaagaccgtgtccagctctgaagtttccgtgtgtagcgagccggtctggaaacagcggctggagttcgacattaatatctgcgatctgcctagaatggcccgcctctgctttgccctgtacgctgtgattgaaaaggcgaaaaaggcccggtctacaaagaaaaagagcaaaaaggctgactgtcccatcgcctgggccaaccttatgctgttcgactataaagatcaactcaagaccggcgaaagatgcctgtacatgtggccttccgtccccgacgagaaaggggagctgcttaatcctacgggaacagtgcgctctaaccccaacaccgatagcgctgccgcgctcctgatttgtctgccggaagttgctcctcatcccgtgtattaccccgccctcgagaagatcctggaacttggccggcactccgagtgcgtccatgtgacagaggaagaacagctgcagctcagagaaatcctggagcgccggggcagcggggaactgtatgagcacgagaaggaccttgtttggaaactcagacacgaagtgcaggagcattttcctgaagccctggctcgcctgctcctggtcaccaagtggaataaacacgaggatgtggcccaaatgctttacctgctctgttcttggccggaactgcccgtgctgtccgctcttgagctcctggacttcagctttcctgattgccatgttggatctttcgccattaagtccctgcggaaactcaccgacgatgagctgtttcagtatcttctgcagctcgtccaagtgctgaagtacgaaagctacctggactgtgagcttacaaagttcctcctggatagagcgctggccaaccgcaaaatcggccactttctcttctggcatctgcggtccgaaatgcacgtgccctctgtcgctcttagatttgggctgattctcgaggcctattgccggggaagcacgcaccatatgaaggtgctgatgaaacagggcgaagctctgtccaaacttaaagccctgaatgacttcgttaagctctctagccagaagacccctaaaccccagacaaaggagctgatgcacctctgtatgcgccaagaggcgtacctggaagccctttcccatctgcagagccctctcgacccctctaccctgctggctgaggtgtgcgtcgaacagtgtacattcatggattccaaaatgaagccgctttggatcatgtatagcaacgaggaggccgggtctggaggctccgtgggcattatctttaaaaatggggacgatctgagacaggacatgctcaccctgcaaatgatccagctcatggatgttctgtggaagcaggaaggacttgacctgcggatgacgccttacggctgcctccccacaggggatagaaccggactgattgaggtggtcctgcgcagcgacaccatcgctaacattcagcttaataaatctaacatggccgccacagctgcgttcaataaggatgccctgctcaactggctcaagagcaaaaatcctggcgaagctctggaccgggccatcgaggaatttaccctgtcctgcgccgggtattgtgtggctacatacgttcttggcattggagatagacacagcgacaacatcatgatccgcgagtctggccaactgttccacattgattttgggcatttcctgggaaattttaagacgaaattcggcatcaacagagagcgggtgccctttattctcacctatgacttcgtccacgtgatccagcaggggaagacaaataactccgaaaaatttgagcgcttcagaggatactgcgaacgggcctacaccattctgcgcagacatggccttctgtttctccacctgttcgcgctcatgcgggctgccgggctgccggagcttagctgttccaaggacatccaatatctgaaggattctctggccctcggcaaaacagaagaggaggctctgaagcatttccgcgtgaaatttaacgaagcccttagagagagctggaagaccaaagtcaattggctggcgcacaacgtttccaaggacaatcggcagtga

SEQ ID NO: 9193 - protein, 728 aa, synthetic construct
  REGION 1..728: note = PI3K__Homo_sapiens__O00459
MAGPEGFQYRALYPFRRERPEDLELLPGDVLVVSRAALQALGVAEGGERCPQSVGWMPGLNERTRQRGDFPGTYVEFLGPVALARPGPRPRGPRPLPARPRDGAPEPGLTLPDLPEQFSPPDVAPPLLVKLVEAIERTGLDSESHYRPELPAPRTDWSLSDVDQWDTAALADGIKSFLLALPAPLVTPEASAEARRALREAAGPVGPALEPPTLPLHRALTLRFLLQHLGRVASRAPALGPAVRALGATFGPLLLRAPPPPSSPPPGGAPDGSEPSPDFPALLVEKLLQEHLEEQEVAPPALPPKPPKAKPASTVLANGGSPPSLQDAEWYWGDISREEVNEKLRDTPDGTFLVRDASSKIQGEYTLTLRKGGNNKLIKVFHRDGHYGFSEPLTFCSVVDLINHYRHESLAQYNAKLDTRLLYPVSKYQQDQIVKEDSVEAVGAQLKVYHQQYQDKSREYDQLYEEYTRTSQELQMKRTAIEAFNETIKIFEEQGQTQEKCSKEYLERFRREGNEKEMQRILLNSERLKSRIAEIHESRTKLEQQLRAQASDNREIDKRMNSLKPDLMQLRKIRDQYLVWLTQKGARQKKINEWLGIKNETEDQYALMEDEDDLPHHEERTWYVGKINRTQAEEMLSGKRDGTFLIRESSQRGCYACSVVVDGDTKHCVIYRTATGFGFAEPYNLYGSLKELVLHYQHASLVQHNDALTVTLAHPVRAPGPGPPPAAR

SEQ ID NO: 9194 - RNA, 2187 nt, synthetic construct
  misc_feature 1..2187: note = PI3K__Homo_sapiens__AAD22671
  source 1..2187: mol_type = other RNA
atggcgggccctgagggcttccagtaccgcgctctgtacccgttccgccgggagcggccggaggacctggagctgctgcccggcgacgtgctggtagtgagccgggcggccttgcaggcgctgggcgtggccgagggtggcgagcgctgcccacagagcgtgggctggatgcccggcctcaacgagcgcacacggcagcgaggtgacttccctggcacctatgtggagttcctggggcccgtggccctggcccggcccggccctcgcccacggggcccccgcccactgcccgccaggccccgtgatggggcccctgagccaggcctcacactccccgacttgcccgagcagttctccccacctgatgtggctccccctcttctggtgaagcttgtggaggccattgaaaggacagggctggacagcgaatctcactaccgcccggagctgcccgcaccgcgtacagactggtccctgagcgacgtggatcagtgggacacggcagccctggctgacggcattaagagcttcctgctggcactgcccgcgccgctcgtgacccccgaggcctcggccgaggcgcgccgggccctgcgggaggccgcggggcccgtggggccggcgctggagccaccgacgctgccgctgcaccgcgcgctcacgctgcgcttcctgctccagcacctgggccgcgtggccagccgcgccccggccctgggtcccgcggtccgggccctgggcgccacctttgggccgctgctgctgcgcgcgccgccgccgccgtcctcgccgccgccagggggcgctcccgacgggagtgagcccagccctgacttcccggcgctgctggtggagaagctgcttcaggaacacttggaagagcaggaggttgcgcccccagcgctgccgcctaaaccccccaaggcaaagccggcctccacagtcctggccaatggagggagcccaccctccctgcaggatgctgagtggtactggggggacatttcaagggaggaggtgaacgagaaactccgggacactcccgatggcaccttcctagtccgagatgcttctagcaagatccagggcgagtacacgctgaccctcaggaaaggcgggaacaataagctgatcaaggtcttccaccgagatgggcactatggcttctcagagccactcaccttctgctccgttgtggacctcatcaatcactaccgccacgagtctctggcccagtacaatgccaagctggacacacggctcctctaccctgtgtccaaataccagcaggaccagattgtcaaggaggacagcgtggaggcagtgggcgcccagcttaaggtctatcaccagcagtaccaggacaagagccgcgagtatgaccagctttatgaagagtacacacggacctcccaggagctgcagatgaagcgtactgcaattgaggccttcaatgagactatcaagatctttgaagagcagggccagactcaagagaaatgcagcaaggaatacctggagcgcttccggcgtgagggcaacgagaaagagatgcaaaggatcctgctgaactccgagcggctcaagtcccgcattgccgagatccatgagagccgcacgaagctggagcagcagctgcgggcccaggcctcggacaacagagagatcgacaagcgcatgaacagcctcaagccggacctcatgcagctgcgcaagatccgagaccagtacctcgtgtggctcacccagaaaggcgcccggcagaagaaaatcaacgagtggctggggattaaaaatgagactgaggaccagtacgcactcatggaggacgaggacgatctcccgcaccacgaggaacgcacttggtacgtgggcaagatcaaccgcacgcaggcagaggagatgctgagtggcaagcgggatggcaccttcctcatccgcgagagcagccagcggggctgctacgcctgctccgtggtagtggacggcgacaccaagcactgcgtcatctaccgcacggccaccggcttcggcttcgcggagccctacaacctgtacgggtcgctgaaggagctggtgctgcactaccagcacgcctcgctggtgcagcacaacgacgcgctcaccgtcaccctggcgcacccagtgcgcgccccgggccccggcccgccgcctgccgcccgctga

SEQ ID NO: 9195 - RNA, 2187 nt, synthetic construct
  misc_feature 1..2187: note = derived and/or modified sequence opt1 fromPI3K__Homo_sapiens__AAD22671
  source 1..2187: mol_type = other RNA
atggccggccccgaggggttccagtaccgcgccctgtacccgttccggcgcgagcggcccgaggacctcgagctgctgcccggcgacgtgctcgtcgtgagccgcgcggccctgcaggccctgggggtggccgagggcggggagcggtgcccccagtccgtcggctggatgccgggcctcaacgagcgcacccggcagcgcggggacttccccggcacctacgtggagttcctggggcccgtggccctggcgcggcccggcccgcgcccccgggggccccgccccctcccggcccggccccgcgacggcgcccccgagcccggcctgacgctgccggacctccccgagcagttcagcccccccgacgtcgccccgcccctgctggtgaagctcgtggaggcgatcgagcggaccgggctggactccgagagccactaccgccccgagctgcccgccccgcggaccgactggtccctcagcgacgtcgaccagtgggacaccgccgccctggccgacggcatcaagtccttcctgctcgcgctgcccgcccccctggtgacgcccgaggccagcgccgaggcccgccgggcgctccgcgaggccgccgggccggtgggccccgccctggagcccccgaccctgcccctccaccgggccctgaccctgcgcttcctcctgcagcacctgggccgcgtcgcgtcccgggcccccgccctcgggcccgccgtgcgcgccctgggcgcgaccttcgggccgctgctcctgcgggcccccccccccccgagctcccccccccccggcggggccccggacggcagcgagccctcccccgacttccccgccctgctcgtggagaagctgctgcaggagcacctcgaggagcaggaggtcgcgccgcccgccctgccccccaagccgcccaaggccaagcccgccagcacggtgctggccaacggcgggtcccccccgagcctccaggacgcggagtggtactggggcgacatctcccgcgaggaggtgaacgagaagctgcgggacacccccgacgggaccttcctggtccgcgacgccagctccaagatccagggcgagtacaccctcacgctgcggaaggggggcaacaacaagctgatcaaggtgttccaccgcgacggccactacgggttcagcgagcccctgaccttctgcagcgtggtcgacctcatcaaccactaccggcacgagtccctggcccagtacaacgccaagctggacacccgcctcctgtacccggtgagcaagtaccagcaggaccagatcgtgaaggaggactccgtcgaggccgtgggcgcgcagctgaaggtctaccaccagcagtaccaggacaagagccgggagtacgaccagctctacgaggagtacacccgcacgtcccaggagctgcagatgaagcggaccgccatcgaggccttcaacgagaccatcaagatcttcgaggagcaggggcagacccaggagaagtgcagcaaggagtacctggagcgcttccggcgcgagggcaacgagaaggagatgcagcggatcctcctgaactccgagcgcctgaagagccggatcgccgagatccacgagtcccgcacgaagctcgagcagcagctgcgcgcccaggcgagcgacaaccgggagatcgacaagcgcatgaactccctgaagcccgacctcatgcagctgcggaagatccgcgaccagtacctggtgtggctcacccagaagggggcccggcagaagaagatcaacgagtggctgggcatcaagaacgagaccgaggaccagtacgccctgatggaggacgaggacgacctcccccaccacgaggagcgcacctggtacgtgggcaagatcaaccggacgcaggccgaggagatgctgagcgggaagcgcgacggcaccttcctgatccgggagtccagccagcgcgggtgctacgcgtgctccgtcgtggtggacggcgacaccaagcactgcgtcatctaccggaccgccacgggcttcgggttcgccgagccctacaacctctacggcagcctgaaggagctggtgctccactaccagcacgcctccctggtgcagcacaacgacgccctgaccgtcaccctcgcgcacccggtgcgcgcccccgggcccggccccccgcccgccgcccggtga

SEQ ID NO: 9196 - RNA, 2187 nt, synthetic construct
  misc_feature 1..2187: note = derived and/or modified sequence opt2 fromPI3K__Homo_sapiens__AAD22671
  source 1..2187: mol_type = other RNA
atggccggccccgagggcttccagtaccgcgccctctaccccttccgccgcgagcgccccgaggacctcgagctcctccccggcgacgtcctcgtcgtctcccgcgccgccctccaggccctcggcgtcgccgagggcggcgagcgctgcccccagtccgtcggctggatgcccggcctcaacgagcgcacccgccagcgcggcgacttccccggcacctacgtcgagttcctcggccccgtcgccctcgcccgccccggcccccgcccccgcggcccccgccccctccccgcccgcccccgcgacggcgcccccgagcccggcctcaccctccccgacctccccgagcagttctccccccccgacgtcgccccccccctcctcgtcaagctcgtcgaggccatcgagcgcaccggcctcgactccgagtcccactaccgccccgagctccccgccccccgcaccgactggtccctctccgacgtcgaccagtgggacaccgccgccctcgccgacggcatcaagtccttcctcctcgccctccccgcccccctcgtcacccccgaggcctccgccgaggcccgccgcgccctccgcgaggccgccggccccgtcggccccgccctcgagccccccaccctccccctccaccgcgccctcaccctccgcttcctcctccagcacctcggccgcgtcgcctcccgcgcccccgccctcggccccgccgtccgcgccctcggcgccaccttcggccccctcctcctccgcgcccccccccccccctcctcccccccccccggcggcgcccccgacggctccgagccctcccccgacttccccgccctcctcgtcgagaagctcctccaggagcacctcgaggagcaggaggtcgccccccccgccctcccccccaagccccccaaggccaagcccgcctccaccgtcctcgccaacggcggctcccccccctccctccaggacgccgagtggtactggggcgacatctcccgcgaggaggtcaacgagaagctccgcgacacccccgacggcaccttcctcgtccgcgacgcctcctccaagatccagggcgagtacaccctcaccctccgcaagggcggcaacaacaagctcatcaaggtcttccaccgcgacggccactacggcttctccgagcccctcaccttctgctccgtcgtcgacctcatcaaccactaccgccacgagtccctcgcccagtacaacgccaagctcgacacccgcctcctctaccccgtctccaagtaccagcaggaccagatcgtcaaggaggactccgtcgaggccgtcggcgcccagctcaaggtctaccaccagcagtaccaggacaagtcccgcgagtacgaccagctctacgaggagtacacccgcacctcccaggagctccagatgaagcgcaccgccatcgaggccttcaacgagaccatcaagatcttcgaggagcagggccagacccaggagaagtgctccaaggagtacctcgagcgcttccgccgcgagggcaacgagaaggagatgcagcgcatcctcctcaactccgagcgcctcaagtcccgcatcgccgagatccacgagtcccgcaccaagctcgagcagcagctccgcgcccaggcctccgacaaccgcgagatcgacaagcgcatgaactccctcaagcccgacctcatgcagctccgcaagatccgcgaccagtacctcgtctggctcacccagaagggcgcccgccagaagaagatcaacgagtggctcggcatcaagaacgagaccgaggaccagtacgccctcatggaggacgaggacgacctcccccaccacgaggagcgcacctggtacgtcggcaagatcaaccgcacccaggccgaggagatgctctccggcaagcgcgacggcaccttcctcatccgcgagtcctcccagcgcggctgctacgcctgctccgtcgtcgtcgacggcgacaccaagcactgcgtcatctaccgcaccgccaccggcttcggcttcgccgagccctacaacctctacggctccctcaaggagctcgtcctccactaccagcacgcctccctcgtccagcacaacgacgccctcaccgtcaccctcgcccaccccgtccgcgcccccggccccggccccccccccgccgcccgctga

SEQ ID NO: 9197 - RNA, 2187 nt, synthetic construct
  misc_feature 1..2187: note = derived and/or modified sequence opt3 fromPI3K__Homo_sapiens__AAD22671
  source 1..2187: mol_type = other RNA
atggccggccccgaggggttccagtacagagctctgtatccttttaggcgggaacgcccagaggacctcgaacttctgccgggagatgtgttggtcgttagccgagcagccttacaagcgctgggtgtggctgagggcggggaacgttgcccccagtccgtaggatggatgcctggcctaaacgagagaaccaggcagcggggtgacttcccagggacatacgtggagtttctcggacccgtcgccctggcacgccctggcccaagacccaggggccctcggccacttccggcccgcccccgagatggggctcctgaaccaggactgactttgcccgacctccctgagcagttctctccacccgatgtggcaccgcctctgctggttaagctcgtggaagccatcgagagaacgggtttagactcagagagtcactataggcccgaactgccagctcctcggaccgattggagcctttccgacgtcgatcaatgggacacagccgcgttggcagatggcattaaatcttttctgctagccctccccgctccactggtgactcccgaggcctcggcagaagctcgtcgcgcccttagagaggcggccgggcctgtaggaccagcactggaaccgcccaccttgcctctccatagggctctgacattacggttcctgctccagcaccttggccgagttgcctcacgcgctccagccctgggtcccgcagtgagagccttgggggctacctttggacctctactgctcagggcgccacccccgcctagcagtccaccccctggcggcgcacccgacgggtccgagccatctcctgatttccccgccctgcttgtcgagaagctgttgcaggaacatctcgaggaacaggaggtggctccaccggccctgcctcccaaaccacccaaggcaaaacctgccagcactgtgttagctaatggaggttccccaccctcactgcaagacgccgaatggtactggggcgacataagtcgggaggaggtcaacgaaaagctacgcgatacacctgacgggacctttctcgttagagatgcaagctctaagatccagggagagtatacgctgactcttaggaaaggcggtaataacaagttgattaaagtgttccaccgtgacgggcattacggcttttccgaaccgctgaccttctgttcagtagtggatctcatcaatcactatcggcacgagagcctggcgcagtacaacgctaaacttgacacacgactgttgtacccagtcagtaagtatcagcaagatcagattgtgaaggaagactctgttgaggccgtgggagcacagctcaaggtctaccatcaacagtatcaggataaatccagagagtacgaccagctgtatgaagagtacactaggaccagccaagaattacagatgaagcgcacagccatcgaggcttttaatgagaccataaaaatcttcgaagaacagggccagacgcaagaaaagtgctcgaaagagtatctggaacggttcagaagggaggggaacgagaaggaaatgcagcgcattctactcaattctgagcgactgaaatcccggatcgccgaaattcacgagtcacgtactaaacttgaacagcagttgagagcacaagctagtgataacagggagatcgacaagcgcatgaatagcctgaagcccgacctcatgcagctgcggaagataagagatcagtacttagtgtggctgacacagaaaggagccaggcaaaagaaaattaacgagtggcttggtatcaagaatgaaaccgaggaccagtacgcgttgatggaagatgaggacgatctccctcatcacgaggagcgaacttggtatgtaggcaagattaaccgcacacaggccgaggaaatgctgtccgggaaacgggacggaacctttctaatcagagagtctagccaaaggggctgttacgcttgctcagttgtggtcgatggtgacacgaagcactgtgtgatctatcgtaccgcaacagggttcggctttgccgaaccatacaatctgtatggaagtctcaaagagctggtccttcattaccagcacgcttccttggtgcagcataacgatgccctgactgttaccttagcacaccccgtgcgcgcgcctggcccggggccccctccagccgctcggtga

SEQ ID NO: 9198 - RNA, 2187 nt, synthetic construct
  misc_feature 1..2187: note = derived and/or modified sequence opt4 fromPI3K__Homo_sapiens__AAD22671
  source 1..2187: mol_type = other RNA
atggccggccccgagggcttccagtacagagccctgtaccccttcagaagagagagacccgaggacctggagctgctgcccggcgacgtgctggtggtgagcagagccgccctgcaggccctgggcgtggccgagggcggcgagagatgcccccagagcgtgggctggatgcccggcctgaacgagagaaccagacagagaggcgacttccccggcacctacgtggagttcctgggccccgtggccctggccagacccggccccagacccagaggccccagacccctgcccgccagacccagagacggcgcccccgagcccggcctgaccctgcccgacctgcccgagcagttcagcccccccgacgtggccccccccctgctggtgaagctggtggaggccatcgagagaaccggcctggacagcgagagccactacagacccgagctgcccgcccccagaaccgactggagcctgagcgacgtggaccagtgggacaccgccgccctggccgacggcatcaagagcttcctgctggccctgcccgcccccctggtgacccccgaggccagcgccgaggccagaagagccctgagagaggccgccggccccgtgggccccgccctggagccccccaccctgcccctgcacagagccctgaccctgagattcctgctgcagcacctgggcagagtggccagcagagcccccgccctgggccccgccgtgagagccctgggcgccaccttcggccccctgctgctgagagccccccccccccccagcagccccccccccggcggcgcccccgacggcagcgagcccagccccgacttccccgccctgctggtggagaagctgctgcaggagcacctggaggagcaggaggtggccccccccgccctgccccccaagccccccaaggccaagcccgccagcaccgtgctggccaacggcggcagcccccccagcctgcaggacgccgagtggtactggggcgacatcagcagagaggaggtgaacgagaagctgagagacacccccgacggcaccttcctggtgagagacgccagcagcaagatccagggcgagtacaccctgaccctgagaaagggcggcaacaacaagctgatcaaggtgttccacagagacggccactacggcttcagcgagcccctgaccttctgcagcgtggtggacctgatcaaccactacagacacgagagcctggcccagtacaacgccaagctggacaccagactgctgtaccccgtgagcaagtaccagcaggaccagatcgtgaaggaggacagcgtggaggccgtgggcgcccagctgaaggtgtaccaccagcagtaccaggacaagagcagagagtacgaccagctgtacgaggagtacaccagaaccagccaggagctgcagatgaagagaaccgccatcgaggccttcaacgagaccatcaagatcttcgaggagcagggccagacccaggagaagtgcagcaaggagtacctggagagattcagaagagagggcaacgagaaggagatgcagagaatcctgctgaacagcgagagactgaagagcagaatcgccgagatccacgagagcagaaccaagctggagcagcagctgagagcccaggccagcgacaacagagagatcgacaagagaatgaacagcctgaagcccgacctgatgcagctgagaaagatcagagaccagtacctggtgtggctgacccagaagggcgccagacagaagaagatcaacgagtggctgggcatcaagaacgagaccgaggaccagtacgccctgatggaggacgaggacgacctgccccaccacgaggagagaacctggtacgtgggcaagatcaacagaacccaggccgaggagatgctgagcggcaagagagacggcaccttcctgatcagagagagcagccagagaggctgctacgcctgcagcgtggtggtggacggcgacaccaagcactgcgtgatctacagaaccgccaccggcttcggcttcgccgagccctacaacctgtacggcagcctgaaggagctggtgctgcactaccagcacgccagcctggtgcagcacaacgacgccctgaccgtgaccctggcccaccccgtgagagcccccggccccggccccccccccgccgccagatga

SEQ ID NO: 9199 - RNA, 2187 nt, synthetic construct
  misc_feature 1..2187: note = derived and/or modified sequence opt5 fromPI3K__Homo_sapiens__AAD22671
  source 1..2187: mol_type = other RNA
atggccggccccgaggggttccagtacagagctctgtatccttttcggcgcgaaagaccggaggacctcgaactgcttcccggagatgtgctggtcgttagccgggccgcgctccaagctctgggcgtggccgaagggggagaacgctgccctcagtccgtgggctggatgcccgggcttaacgagagaacccggcagcgcggagacttccctggcacatacgtcgagtttctgggccccgtggccctcgctagacctgggccgcggccccgcggacctagacccctgcctgcccggccccgcgatggcgctccggaacctgggctgacgctccccgacctgcctgagcagttctctcctcccgatgttgcccctccgcttctggtgaagctcgtcgaagcgatcgagagaaccggactggacagcgagtcccactatcggcccgaacttcctgctccccgcacagattggtctctgagcgacgtggatcaatgggacaccgccgccctcgctgatggcattaaatcctttctgctggccctccctgcgcccctggttacaccggaggcctctgctgaagccagacgggctcttagagaggccgccgggcctgtgggacccgctctggaacctcccaccctccctctgcatcgcgcgcttacactgcggttcctcctgcagcacctgggcagagtcgccagccgcgctcccgccctcggcccggccgtgcgggctctgggggccacctttggacctcttctgctcagagcgcccccgcctccctcctctccccctcccggcggggctcccgacggaagcgagccctcccctgatttccccgccctgcttgtggagaagctgctccaggaacatctggaggaacaggaggtcgccccgcctgctctgccccctaaacccccgaaggccaaacctgctagcacggttctcgccaatggcgggtctcccccttccctgcaagacgcggaatggtactggggagacatcagccgcgaggaggtgaacgaaaagctgcgggatacccccgacggcacatttcttgtgagagatgcctcttccaagattcagggcgagtataccctcacactgcgcaaagggggaaataacaagctgatcaaagtcttccaccgggacggccattacgggtttagcgaaccccttaccttctgttccgtggttgatctcattaatcactatagacacgagtctctggctcagtacaacgccaagctggacacgcgcctcctgtaccctgtgagcaaatatcagcaagatcagatcgtcaaggaagactccgtggaggctgttggagcccagcttaaggtgtaccatcaacagtatcaggataaaagccgggagtacgaccagctgtatgaagagtacacaagaacctctcaagaactccagatgaagcggacagcgatcgaggcctttaatgagaccattaaaatcttcgaggagcagggccagacccaagaaaagtgctccaaagagtatctggaacgcttcagacgggaggggaacgagaaggaaatgcagcgcattctgcttaatagcgagagactcaaatctcggatcgctgaaattcacgagagcagaacaaagctggaacagcagctgcgcgcccaggcttccgataacagagagatcgacaagcggatgaactctctcaaaccggacctgatgcaacttcgcaagattagagatcagtacctggtctggctcacgcagaaaggcgcccggcaaaagaaaatcaatgagtggctgggaatcaagaatgaaaccgaggaccagtacgccctgatggaagatgaggacgatcttccccatcacgaggaacgcacatggtatgtgggcaagattaacagaacccaggctgaggaaatgctcagcgggaaacgggacggaacatttctgatccgcgagtccagccaaagaggctgttacgcgtgctctgtcgtggttgatggggacaccaagcactgtgtgatttatcggacggccacaggattcggctttgctgaaccttacaatctgtatgggtccctcaaagagctggtccttcattaccagcacgccagcctggtgcagcataacgatgccctcaccgttaccctggctcaccccgtgcgcgcccctggccccggacctccgcccgcggctagatga

SEQ ID NO: 9200 - protein, 724 aa, synthetic construct
  REGION 1..724: note = PI3K__Homo_sapiens__P27986
MSAEGYQYRALYDYKKEREEDIDLHLGDILTVNKGSLVALGFSDGQEARPEEIGWLNGYNETTGERGDFPGTYVEYIGRKKISPPTPKPRPPRPLPVAPGSSKTEADVEQQALTLPDLAEQFAPPDIAPPLLIKLVEAIEKKGLECSTLYRTQSSSNLAELRQLLDCDTPSVDLEMIDVHVLADAFKRYLLDLPNPVIPAAVYSEMISLAPEVQSSEEYIQLLKKLIRSPSIPHQYWLTLQYLLKHFFKLSQTSSKNLLNARVLSEIFSPMLFRFSAASSDNTENLIKVIEILISTEWNERQPAPALPPKPPKPTTVANNGMNNNMSLQDAEWYWGDISREEVNEKLRDTADGTFLVRDASTKMHGDYTLTLRKGGNNKLIKIFHRDGKYGFSDPLTFSSVVELINHYRNESLAQYNPKLDVKLLYPVSKYQQDQVVKEDNIEAVGKKLHEYNTQFQEKSREYDRLYEEYTRTSQEIQMKRTAIEAFNETIKIFEEQCQTQERYSKEYIEKFKREGNEKEIQRIMHNYDKLKSRISEIIDSRRRLEEDLKKQAAEYREIDKRMNSIKPDLIQLRKTRDQYLMWLTQKGVRQKKLNEWLGNENTEDQYSLVEDDEDLPHHDEKTWNVGSSNRNKAENLLRGKRDGTFLVRESSKQGCYACSVVVDGEVKHCVINKTATGYGFAEPYNLYSSLKELVLHYQHTSLVQHNDSLNVTLAYPVYAQQRR

SEQ ID NO: 9201 - RNA, 2175 nt, synthetic construct
  misc_feature 1..2175: note = PI3K__Homo_sapiens__AAH94795
  source 1..2175: mol_type = other RNA
atgagtgctgaggggtaccagtacagagcgctgtatgattataaaaaggaaagagaagaagatattgacttgcacttgggtgacatattgactgtgaataaagggtccttagtagctcttggattcagtgatggacaggaagccaggcctgaagaaattggctggttaaatggctataatgaaaccacaggggaaaggggggactttccgggaacttacgtagaatatattggaaggaaaaaaatctcgcctcccacaccaaagccccggccacctcggcctcttcctgttgcaccaggttcttcgaaaactgaagcagatgttgaacaacaagctttgactctcccggatcttgcagagcagtttgcccctcctgacattgccccgcctcttcttatcaagctcgtggaagccattgaaaagaaaggtctggaatgttcaactctatacagaacacagagctccagcaacctggcagaattacgacagcttcttgattgtgatacaccctccgtggacttggaaatgatcgatgtgcacgttttggctgacgctttcaaacgctatctcctggacttaccaaatcctgtcattccagcagccgtttacagtgaaatgatttctttagctccagaagtacaaagctccgaagaatatattcagctattgaagaagcttattaggtcgcctagcatacctcatcagtattggcttacgcttcagtatttgttaaaacatttcttcaagctctctcaaacctccagcaaaaatctgttgaatgcaagagtactctctgaaattttcagccctatgcttttcagattctcagcagccagctctgataatactgaaaacctcataaaagttatagaaattttaatctcaactgaatggaatgaacgacagcctgcaccagcactgcctcctaaaccaccaaaacctactactgtagccaacaacggtatgaataacaatatgtccttacaagatgctgaatggtactggggagatatctcgagggaagaagtgaatgaaaaacttcgagatacagcagacgggacctttttggtacgagatgcgtctactaaaatgcatggtgattatactcttacactaaggaaagggggaaataacaaattaatcaaaatatttcatcgagatgggaaatatggcttctctgacccattaaccttcagttctgtggttgaattaataaaccactaccggaatgaatctctagctcagtataatcccaaattggatgtgaaattactttatccagtatccaaataccaacaggatcaagttgtcaaagaagataatattgaagctgtagggaaaaaattacatgaatataacactcagtttcaagaaaaaagtcgagaatatgatagattatatgaagaatatacccgcacatcccaggaaatccaaatgaaaaggacagctattgaagcatttaatgaaaccataaaaatatttgaagaacagtgccagacccaagagcggtacagcaaagaatacatagaaaagtttaaacgtgaaggcaatgagaaagaaatacaaaggattatgcataattatgataagttgaagtctcgaatcagtgaaattattgacagtagaagaagattggaagaagacttgaagaagcaggcagctgagtatcgagaaattgacaaacgtatgaacagcattaaaccagaccttatccagctgagaaagacgagagaccaatacttgatgtggttgactcaaaaaggtgttcggcaaaagaagttgaacgagtggttgggcaatgaaaacactgaagaccaatattcactggtggaagatgatgaagatttgccccatcatgatgagaagacatggaatgttggaagcagcaaccgaaacaaagctgaaaacctgttgcgagggaagcgagatggcacttttcttgtccgggagagcagtaaacagggctgctatgcctgctctgtagtggtggacggcgaagtaaagcattgtgtcataaacaaaacagcaactggctatggctttgccgagccctataacttgtacagctctctgaaagaactggtgctacattaccaacacacctcccttgtgcagcacaacgactccctcaatgtcacactagcctacccagtatatgcacagcagaggcgatga

SEQ ID NO: 9202 - RNA, 2175 nt, synthetic construct
  misc_feature 1..2175: note = derived and/or modified sequence opt1 fromPI3K__Homo_sapiens__AAH94795
  source 1..2175: mol_type = other RNA
atgagcgccgagggctaccagtaccgcgccctgtacgactacaagaaggagcgggaggaggacatcgacctccacctgggggacatcctgaccgtgaacaagggctccctcgtcgcgctggggttcagcgacggccaggaggcccgccccgaggagatcgggtggctgaacggctacaacgagaccacgggcgagcgcggggacttcccgggcacctacgtggagtacatcgggcggaagaagatctccccgcccacccccaagccccggccgccccgccccctccccgtggcccccggcagctccaagaccgaggccgacgtcgagcagcaggccctgacgctgcccgacctcgcggagcagttcgcgcccccggacatcgccccgcccctgctgatcaagctcgtggaggccatcgagaagaaggggctggagtgcagcaccctgtaccggacccagtccagctccaacctcgccgagctgcgccagctgctcgactgcgacacccccagcgtggacctggagatgatcgacgtccacgtgctggccgacgccttcaagcggtacctcctggacctgcccaaccccgtgatccccgccgccgtctactccgagatgatcagcctcgcgcccgaggtgcagtccagcgaggagtacatccagctgctgaagaagctcatccgctccccgagcatcccccaccagtactggctgacgctgcagtacctcctgaagcacttcttcaagctgtcccagaccagctccaagaacctcctgaacgcccgggtgctgagcgagatcttcagccccatgctgttccgcttctccgccgccagctccgacaacaccgagaacctgatcaaggtcatcgagatcctgatcagcaccgagtggaacgagcggcagcccgccccggcgctcccgcccaagccgcccaagcccacgaccgtggccaacaacggcatgaacaacaacatgtccctgcaggacgccgagtggtactggggcgacatcagccgcgaggaggtgaacgagaagctgcgggacaccgccgacgggaccttcctcgtccgcgacgcctccacgaagatgcacggcgactacaccctgaccctgcggaagggcgggaacaacaagctcatcaagatcttccaccgcgacggcaagtacgggttcagcgaccccctgaccttctccagcgtggtggagctgatcaaccactaccggaacgagtccctcgcgcagtacaaccccaagctggacgtcaagctgctgtaccccgtgagcaagtaccagcaggaccaggtggtcaaggaggacaacatcgaggccgtgggcaagaagctccacgagtacaacacgcagttccaggagaagtcccgcgagtacgaccggctgtacgaggagtacacccgcaccagccaggagatccagatgaagcgcaccgccatcgaggccttcaacgagacgatcaagatcttcgaggagcagtgccagacccaggagcggtactccaaggagtacatcgagaagttcaagcgcgaggggaacgagaaggagatccagcggatcatgcacaactacgacaagctcaagagccgcatctccgagatcatcgacagccggcgccggctcgaggaggacctgaagaagcaggccgcggagtaccgcgagatcgacaagcggatgaactccatcaagcccgacctgatccagctccgcaagacccgggaccagtacctgatgtggctgacccagaagggcgtgcgccagaagaagctcaacgagtggctggggaacgagaacacggaggaccagtacagcctggtcgaggacgacgaggacctcccccaccacgacgagaagacctggaacgtgggcagctccaaccggaacaaggccgagaacctgctgcgcggcaagcgggacgggaccttcctcgtccgcgagagctccaagcagggctgctacgcctgcagcgtggtggtcgacggggaggtgaagcactgcgtgatcaacaagaccgccacgggctacgggttcgcggagccgtacaacctgtactccagcctgaaggagctcgtcctgcactaccagcacacctccctggtgcagcacaacgacagcctcaacgtgaccctggcctaccccgtctacgcccagcagcggcgctga

SEQ ID NO: 9203 - RNA, 2175 nt, synthetic construct
  misc_feature 1..2175: note = derived and/or modified sequence opt2 fromPI3K__Homo_sapiens__AAH94795
  source 1..2175: mol_type = other RNA
atgtccgccgagggctaccagtaccgcgccctctacgactacaagaaggagcgcgaggaggacatcgacctccacctcggcgacatcctcaccgtcaacaagggctccctcgtcgccctcggcttctccgacggccaggaggcccgccccgaggagatcggctggctcaacggctacaacgagaccaccggcgagcgcggcgacttccccggcacctacgtcgagtacatcggccgcaagaagatctccccccccacccccaagccccgccccccccgccccctccccgtcgcccccggctcctccaagaccgaggccgacgtcgagcagcaggccctcaccctccccgacctcgccgagcagttcgccccccccgacatcgccccccccctcctcatcaagctcgtcgaggccatcgagaagaagggcctcgagtgctccaccctctaccgcacccagtcctcctccaacctcgccgagctccgccagctcctcgactgcgacaccccctccgtcgacctcgagatgatcgacgtccacgtcctcgccgacgccttcaagcgctacctcctcgacctccccaaccccgtcatccccgccgccgtctactccgagatgatctccctcgcccccgaggtccagtcctccgaggagtacatccagctcctcaagaagctcatccgctccccctccatcccccaccagtactggctcaccctccagtacctcctcaagcacttcttcaagctctcccagacctcctccaagaacctcctcaacgcccgcgtcctctccgagatcttctcccccatgctcttccgcttctccgccgcctcctccgacaacaccgagaacctcatcaaggtcatcgagatcctcatctccaccgagtggaacgagcgccagcccgcccccgccctcccccccaagccccccaagcccaccaccgtcgccaacaacggcatgaacaacaacatgtccctccaggacgccgagtggtactggggcgacatctcccgcgaggaggtcaacgagaagctccgcgacaccgccgacggcaccttcctcgtccgcgacgcctccaccaagatgcacggcgactacaccctcaccctccgcaagggcggcaacaacaagctcatcaagatcttccaccgcgacggcaagtacggcttctccgaccccctcaccttctcctccgtcgtcgagctcatcaaccactaccgcaacgagtccctcgcccagtacaaccccaagctcgacgtcaagctcctctaccccgtctccaagtaccagcaggaccaggtcgtcaaggaggacaacatcgaggccgtcggcaagaagctccacgagtacaacacccagttccaggagaagtcccgcgagtacgaccgcctctacgaggagtacacccgcacctcccaggagatccagatgaagcgcaccgccatcgaggccttcaacgagaccatcaagatcttcgaggagcagtgccagacccaggagcgctactccaaggagtacatcgagaagttcaagcgcgagggcaacgagaaggagatccagcgcatcatgcacaactacgacaagctcaagtcccgcatctccgagatcatcgactcccgccgccgcctcgaggaggacctcaagaagcaggccgccgagtaccgcgagatcgacaagcgcatgaactccatcaagcccgacctcatccagctccgcaagacccgcgaccagtacctcatgtggctcacccagaagggcgtccgccagaagaagctcaacgagtggctcggcaacgagaacaccgaggaccagtactccctcgtcgaggacgacgaggacctcccccaccacgacgagaagacctggaacgtcggctcctccaaccgcaacaaggccgagaacctcctccgcggcaagcgcgacggcaccttcctcgtccgcgagtcctccaagcagggctgctacgcctgctccgtcgtcgtcgacggcgaggtcaagcactgcgtcatcaacaagaccgccaccggctacggcttcgccgagccctacaacctctactcctccctcaaggagctcgtcctccactaccagcacacctccctcgtccagcacaacgactccctcaacgtcaccctcgcctaccccgtctacgcccagcagcgccgctga

SEQ ID NO: 9204 - RNA, 2175 nt, synthetic construct
  misc_feature 1..2175: note = derived and/or modified sequence opt3 fromPI3K__Homo_sapiens__AAH94795
  source 1..2175: mol_type = other RNA
atgagcgccgagggctaccagtatagagctctgtacgactataagaaagaaagggaggaagatatcgacctccaccttggggatattctgaccgtgaacaagggatccttggtcgcattaggtttctctgacggccaagaggcccggcccgaagagatagggtggctgaatggatacaacgagacaactggcgaacgcggtgattttcctgggacgtatgttgagtacatcggacgaaagaagatttcaccaccgacccccaaacctcgtccacccagacctctaccagtggcgcccggcagtagcaagacagaagctgacgtagagcagcaggccctcactctgcctgatcttgcagagcagttcgccccaccggacatcgctccccctctgttgattaagctcgtggaagcaatcgagaaaaagggcctggaatgctccaccctgtataggacacaatcttcgtcaaatctcgccgagttacggcagctgcttgattgtgacaccccaagcgtcgatttggaaatgatagacgtgcatgttctggctgatgcctttaaacgctacctactcgacctgcccaaccctgtgatcccagcggcagtctacagtgagatgatttcccttgcccccgaggtgcagtctagcgaagagtatatccagctgttgaagaaactcattagatccccgtcaatccctcaccaatactggctgactttacagtatctgctcaagcatttctttaaacttagtcagacaagctctaaaaatctgttgaacgctagggtactatccgaaatattctcacccatgctgtttcggttcagcgccgcaagttctgacaataccgagaacctcattaaggttatcgaaattctgatctccacggagtggaatgagcgccagccagctcctgcccttcccccaaaaccccctaagccaactaccgtggcgaacaatgggatgaacaataacatgagcctgcaagatgccgaatggtactggggagacatctcgcgagaggaagtcaatgagaaattgagagatacagcagacggtacttttctcgtgagggatgcttctaccaagatgcacggcgactatacactgaccttacggaaagggggaaacaacaagctgattaagatattccatcgtgatggcaaatacggtttttccgacccgctaacgttctcaagtgtggtcgaactcatcaatcactatcgcaacgagagcctggcccagtacaatcccaaacttgatgttaagttgctgtaccctgtgtccaagtatcagcaagaccaggtagtgaaagaggataacattgaagctgtcgggaagaagctccacgagtacaatactcagtttcaggaaaaatctagagagtatgacaggctgtacgaggaatatacacggaccagccaagagatccagatgaagcgaactgccatagaagcattcaacgagacaattaaaatcttcgaggaacagtgccagacccaagagcgctactcaaaggaatatatcgagaaatttaagagagaaggaaatgagaaggaaattcagaggatcatgcataactacgacaaacttaagagtcggatttccgagataatcgatagccgcagaaggctggaggaagacttgaaaaagcaggccgctgagtaccgtgaaattgataaacggatgaactctatcaagccagacctcatccagctgcgaaagacgagagatcaatatttaatgtggctgacccagaaaggcgtgaggcagaagaaactaaatgagtggctcggcaatgaaaacacagaggaccagtactcactggttgaggatgacgaagatcttccccaccatgacgagaagacttggaatgtggggagtagcaaccgcaataaagcggaaaacttgctgcggggaaagagagatggtaccttcctcgtcagggagtcctctaaacaaggctgttatgcatgctcggtggtagttgacggggaggtgaagcactgtgtcattaacaagacagccactggatacggctttgctgaaccttataatctgtacagctccttaaaagagctggtgcttcactatcagcatacctcattggtccagcacaacgatagtctcaatgtgacactggcctacccagtttacgcacaacagcgccgatga

SEQ ID NO: 9205 - RNA, 2175 nt, synthetic construct
  misc_feature 1..2175: note = derived and/or modified sequence opt4 fromPI3K__Homo_sapiens__AAH94795
  source 1..2175: mol_type = other RNA
atgagcgccgagggctaccagtacagagccctgtacgactacaagaaggagagagaggaggacatcgacctgcacctgggcgacatcctgaccgtgaacaagggcagcctggtggccctgggcttcagcgacggccaggaggccagacccgaggagatcggctggctgaacggctacaacgagaccaccggcgagagaggcgacttccccggcacctacgtggagtacatcggcagaaagaagatcagcccccccacccccaagcccagaccccccagacccctgcccgtggcccccggcagcagcaagaccgaggccgacgtggagcagcaggccctgaccctgcccgacctggccgagcagttcgccccccccgacatcgccccccccctgctgatcaagctggtggaggccatcgagaagaagggcctggagtgcagcaccctgtacagaacccagagcagcagcaacctggccgagctgagacagctgctggactgcgacacccccagcgtggacctggagatgatcgacgtgcacgtgctggccgacgccttcaagagatacctgctggacctgcccaaccccgtgatccccgccgccgtgtacagcgagatgatcagcctggcccccgaggtgcagagcagcgaggagtacatccagctgctgaagaagctgatcagaagccccagcatcccccaccagtactggctgaccctgcagtacctgctgaagcacttcttcaagctgagccagaccagcagcaagaacctgctgaacgccagagtgctgagcgagatcttcagccccatgctgttcagattcagcgccgccagcagcgacaacaccgagaacctgatcaaggtgatcgagatcctgatcagcaccgagtggaacgagagacagcccgcccccgccctgccccccaagccccccaagcccaccaccgtggccaacaacggcatgaacaacaacatgagcctgcaggacgccgagtggtactggggcgacatcagcagagaggaggtgaacgagaagctgagagacaccgccgacggcaccttcctggtgagagacgccagcaccaagatgcacggcgactacaccctgaccctgagaaagggcggcaacaacaagctgatcaagatcttccacagagacggcaagtacggcttcagcgaccccctgaccttcagcagcgtggtggagctgatcaaccactacagaaacgagagcctggcccagtacaaccccaagctggacgtgaagctgctgtaccccgtgagcaagtaccagcaggaccaggtggtgaaggaggacaacatcgaggccgtgggcaagaagctgcacgagtacaacacccagttccaggagaagagcagagagtacgacagactgtacgaggagtacaccagaaccagccaggagatccagatgaagagaaccgccatcgaggccttcaacgagaccatcaagatcttcgaggagcagtgccagacccaggagagatacagcaaggagtacatcgagaagttcaagagagagggcaacgagaaggagatccagagaatcatgcacaactacgacaagctgaagagcagaatcagcgagatcatcgacagcagaagaagactggaggaggacctgaagaagcaggccgccgagtacagagagatcgacaagagaatgaacagcatcaagcccgacctgatccagctgagaaagaccagagaccagtacctgatgtggctgacccagaagggcgtgagacagaagaagctgaacgagtggctgggcaacgagaacaccgaggaccagtacagcctggtggaggacgacgaggacctgccccaccacgacgagaagacctggaacgtgggcagcagcaacagaaacaaggccgagaacctgctgagaggcaagagagacggcaccttcctggtgagagagagcagcaagcagggctgctacgcctgcagcgtggtggtggacggcgaggtgaagcactgcgtgatcaacaagaccgccaccggctacggcttcgccgagccctacaacctgtacagcagcctgaaggagctggtgctgcactaccagcacaccagcctggtgcagcacaacgacagcctgaacgtgaccctggcctaccccgtgtacgcccagcagagaagatga

SEQ ID NO: 9206 - RNA, 2175 nt, synthetic construct
  misc_feature 1..2175: note = derived and/or modified sequence opt5 fromPI3K__Homo_sapiens__AAH94795
  source 1..2175: mol_type = other RNA
atgagcgccgagggctaccagtatagagctctgtacgactataagaaagaacgggaggaagatatcgacctccacctgggggatattcttaccgtgaacaagggatccctggtcgccctcggcttctctgacgggcaagaggcgcgccccgaagagatcggatggctgaatggctacaacgagacaacgggggaaagaggagattttcctggcacctatgttgagtacattggccggaaaaagatcagcccgcccacacctaaaccccgccctcccagacctcttccggtggctcccgggtcctctaagaccgaagccgacgtggagcagcaggccctgacactccctgatctggctgagcagttcgctccccctgacattgctcccccgctgctcatcaagctggtcgaagccatcgagaaaaagggacttgaatgcagcaccctgtatcggacacaatcctctagcaatctcgcggagctgcgccagcttctggattgtgacaccccttccgtggatctcgaaatgattgacgttcatgtgctggccgatgcttttaaaagatacctgctcgacctgcccaaccctgtcatccccgccgctgtgtacagcgagatgatttctcttgcccccgaggttcagtccagcgaagagtatatccagctgctcaagaaactgattcggtctccttccatcccgcaccaatactggcttacgctgcagtatctcctgaagcatttctttaagctgagccagacctcttccaaaaatctcctgaacgcgcgcgtgcttagcgaaattttctcccccatgctgtttagattctctgccgctagctccgacaatacagagaacctcatcaaggtcatcgaaattctgatcagcaccgagtggaatgagcggcagcctgcccccgcccttcctcccaaaccgcctaagcccacaaccgtggccaacaatggcatgaacaataacatgtctctgcaagatgccgaatggtactggggagacatttcccgcgaggaagtgaatgagaaactcagagatacggctgacgggacatttctggtccgggatgcgagcaccaagatgcacggcgactatacactgaccctccgcaaagggggaaacaacaagctgatcaagattttccatagagatggcaaatacggcttttctgaccctcttaccttcagctccgttgtggaactgatcaatcactatcggaacgagtctctcgcccagtacaatcccaagctggatgtgaaactgctttaccctgtcagcaagtatcagcaagaccaggtggttaaagaggataacatcgaagctgtggggaagaagctccacgagtacaatacacagtttcaggaaaaatccagagagtatgaccgcctgtacgaggaatatacgcggaccagccaagagattcagatgaagagaacagccatcgaagccttcaacgagaccattaaaatcttcgaggaacagtgccagacacaagagcgctactctaaggaatatattgagaaatttaagcgggaaggaaatgagaaggaaatccagagaatcatgcataactacgacaaactgaagtcccgcattagcgagatcattgattctcggagacgcctcgaggaagacctgaaaaagcaggctgccgagtaccgggaaatcgataaaagaatgaactccattaagcccgaccttatccagctgcgcaagacccgggatcaatatctcatgtggctgacgcagaaaggcgtcagacagaagaaactgaatgagtggcttgggaatgaaaacacagaggaccagtacagcctcgtggaggatgacgaagatctgccgcaccatgacgagaagacctggaatgttggatcctctaaccggaataaagcggaaaacctgctccgcggcaagagagatgggaccttcctggtgcgggagagctccaaacaaggatgttatgcttgctctgtcgtggtcgacggcgaggtgaagcactgtgttattaacaagacagccaccggctacgggtttgccgaaccttataatctttacagctccctgaaagagctcgtgctgcactatcagcatacaagcctggtccagcacaacgattctcttaatgtgacgctcgcttaccccgtttacgcccaacagagacgctga

SEQ ID NO: 9207 - protein, 1068 aa, synthetic construct
  REGION 1..1068: note = PI3K__Homo_sapiens__P42336
MPPRPSSGELWGIHLMPPRILVECLLPNGMIVTLECLREATLITIKHELFKEARKYPLHQLLQDESSYIFVSVTQEAEREEFFDETRRLCDLRLFQPFLKVIEPVGNREEKILNREIGFAIGMPVCEFDMVKDPEVQDFRRNILNVCKEAVDLRDLNSPHSRAMYVYPPNVESSPELPKHIYNKLDKGQIIVVIWVIVSPNNDKQKYTLKINHDCVPEQVIAEAIRKKTRSMLLSSEQLKLCVLEYQGKYILKVCGCDEYFLEKYPLSQYKYIRSCIMLGRMPNLMLMAKESLYSQLPMDCFTMPSYSRRISTATPYMNGETSTKSLWVINSALRIKILCATYVNVNIRDIDKIYVRTGIYHGGEPLCDNVNTQRVPCSNPRWNEWLNYDIYIPDLPRAARLCLSICSVKGRKGAKEEHCPLAWGNINLFDYTDTLVSGKMALNLWPVPHGLEDLLNPIGVTGSNPNKETPCLELEFDWFSSVVKFPDMSVIEEHANWSVSREAGFSYSHAGLSNRLARDNELRENDKEQLKAISTRDPLSEITEQEKDFLWSHRHYCVTIPEILPKLLLSVKWNSRDEVAQMYCLVKDWPPIKPEQAMELLDCNYPDPMVRGFAVRCLEKYLTDDKLSQYLIQLVQVLKYEQYLDNLLVRFLLKKALTNQRIGHFFFWHLKSEMHNKTVSQRFGLLLESYCRACGMYLKHLNRQVEAMEKLINLTDILKQEKKDETQKVQMKFLVEQMRRPDFMDALQGFLSPLNPAHQLGNLRLEECRIMSSAKRPLWLNWENPDIMSELLFQNNEIIFKNGDDLRQDMLTLQIIRIMENIWQNQGLDLRMLPYGCLSIGDCVGLIEVVRNSHTIMQIQCKGGLKGALQFNSHTLHQWLKDKNKGEIYDAAIDLFTRSCAGYCVATFILGIGDRHNSNIMVKDDGQLFHIDFGHFLDHKKKKFGYKRERVPFVLTQDFLIVISKGAQECTKTREFERFQEMCYKAYLAIRQHANLFINLFSMMLGSGMPELQSFDDIAYIRKTLALDKTEQEALEYFMKQMNDAHHGGWTTKMDWIFHTIKQHALN

SEQ ID NO: 9208 - RNA, 3207 nt, synthetic construct
  misc_feature 1..3207: note = PI3K__Homo_sapiens__AAB39753
  source 1..3207: mol_type = other RNA
atgcctccaagaccatcatcaggtgaactgtggggcatccacttgatgcccccaagaatcctagtagaatgtttactaccaaatggaatgatagtgactttagaatgcctccgtgaggctacattaataaccataaagcatgaactatttaaagaagcaagaaaataccccctccatcaacttcttcaagatgaatcttcttacattttcgtaagtgttacccaagaagcagaaagggaagaattttttgatgaaacaagacgactttgtgaccttcggctttttcaaccctttttaaaagtaattgaaccagtaggcaaccgtgaagaaaagatcctcaatcgagaaattggttttgctatcggcatgccagtgtgtgaatttgatatggttaaagatccagaagtacaggacttccgaagaaatattctgaacgtttgtaaagaagctgtggatcttagggacctcaattcacctcatagtagagcaatgtatgtctatcctccaaatgtagaatcttcaccagaattgccaaagcacatatataataaattagataaagggcaaataatagtggtgatctgggtaatagtttctccaaataatgacaagcagaagtatactctgaaaatcaaccatgactgtgtaccagaacaagtaattgctgaagcaatcaggaaaaaaactcgaagtatgttgctatcctctgaacaactaaaactctgtgttttagaatatcagggcaagtatattttaaaagtgtgtggatgtgatgaatacttcctagaaaaatatcctctgagtcagtataagtatataagaagctgtataatgcttgggaggatgcccaatttgatgttgatggctaaagaaagcctctattctcaactgccaatggactgttttacaatgccatcttattccagacgcatttccacagctacaccatatatgaatggagaaacatctacaaaatccctttgggttataaatagtgcactcagaataaaaattctttgtgcaacctacgtgaatgtaaatattcgagacattgataagatctatgttcgaacaggtatctaccatggaggagaacccttatgtgacaatgtgaacactcaaagagtaccttgttccaatcccaggtggaatgaatggctgaattatgatatatacattcctgatcttcctcgtgctgctcgactttgcctttccatttgctctgttaaaggccgaaagggtgctaaagaggaacactgtccattggcatggggaaatataaacttgtttgattacacagacactctagtatctggaaaaatggctttgaatctttggccagtacctcatggactagaagatttgctgaaccctattggtgttactggatcaaatccaaataaagaaactccatgcttagagttggagtttgactggttcagcagtgtggtaaagttcccagatatgtcagtgattgaagagcatgccaattggtctgtatcccgagaagcaggatttagctattcccacgcaggactgagtaacagactagctagagacaatgaattaagggaaaatgacaaagaacagctcaaagcaatttctacacgagatcctctctctgaaatcactgagcaggagaaagattttctatggagtcacagacactattgtgtaactatccccgaaattctacccaaattgcttctgtctgttaaatggaattctagagatgaagtagcccagatgtattgcttggtaaaagattggcctccaatcaaacctgaacaggctatggaacttctggactgtaattacccagatcctatggttcgaggttttgctgttcggtgcttggaaaaatatttaacagatgacaaactttctcagtatttaattcagctagtacaggtcctaaaatatgaacaatatttggataacttgcttgtgagatttttactgaagaaagcattgactaatcaaaggattgggcactttttcttttggcatttaaaatctgagatgcacaataaaacagttagccagaggtttggcctgcttttggagtcctattgtcgtgcatgtgggatgtatttgaagcacctgaataggcaagtcgaggcaatggaaaagctcattaacttaactgacattctcaaacaggagaagaaggatgaaacacaaaaggtacagatgaagtttttagttgagcaaatgaggcgaccagatttcatggatgctctacagggctttctgtctcctctaaaccctgctcatcaactaggaaacctcaggcttgaagagtgtcgaattatgtcctctgcaaaaaggccactgtggttgaattgggagaacccagacatcatgtcagagttactgtttcagaacaatgagatcatctttaaaaatggggatgatttacggcaagatatgctaacacttcaaattattcgtattatggaaaatatctggcaaaatcaaggtcttgatcttcgaatgttaccttatggttgtctgtcaatcggtgactgtgtgggacttattgaggtggtgcgaaattctcacactattatgcaaattcagtgcaaaggcggcttgaaaggtgcactgcagttcaacagccacacactacatcagtggctcaaagacaagaacaaaggagaaatatatgatgcagccattgacctgtttacacgttcatgtgctggatactgtgtagctaccttcattttgggaattggagatcgtcacaatagtaacatcatggtgaaagacgatggacagctgtttcatatagattttggacactttttggatcacaagaagaaaaaatttggttataaacgagaacgtgtgccatttgttttgacacaggatttcttaatagtgattagtaaaggagcccaagaatgcacaaagacaagagaatttgagaggtttcaggagatgtgttacaaggcttatctagctattcgacagcatgccaatctcttcataaatcttttctcaatgatgcttggctctggaatgccagaactacaatcttttgatgacattgcatacattcgaaagaccctagccttagataaaactgagcaagaggctttggagtatttcatgaaacaaatgaatgatgcacatcatggtggctggacaacaaaaatggattggatcttccacacaattaaacagcatgcattgaactga

SEQ ID NO: 9209 - RNA, 3207 nt, synthetic construct
  misc_feature 1..3207: note = derived and/or modified sequence opt1 fromPI3K__Homo_sapiens__AAB39753
  source 1..3207: mol_type = other RNA
atgcccccgcgccccagctccggcgagctgtgggggatccacctcatgccgccccggatcctggtggagtgcctgctccccaacggcatgatcgtcaccctggagtgcctgcgcgaggccaccctcatcacgatcaagcacgagctgttcaaggaggcccggaagtaccccctgcaccagctcctgcaggacgagagctcctacatcttcgtgagcgtgacccaggaggcggagcgcgaggagttcttcgacgagacccggcgcctgtgcgacctccggctgttccagcccttcctgaaggtcatcgagcccgtggggaaccgcgaggagaagatcctcaaccgggagatcggcttcgccatcgggatgccggtgtgcgagttcgacatggtcaaggaccccgaggtgcaggacttccgccggaacatcctgaacgtgtgcaaggaggccgtcgacctgcgcgacctcaacagcccccacagccgggccatgtacgtgtacccgcccaacgtggagtccagccccgagctgcccaagcacatctacaacaagctggacaagggccagatcatcgtcgtgatctgggtgatcgtctcccccaacaacgacaagcagaagtacaccctcaagatcaaccacgactgcgtgccggagcaggtcatcgccgaggcgatccgcaagaagacgcggagcatgctgctgtccagcgagcagctcaagctgtgcgtgctggagtaccagggcaagtacatcctcaaggtgtgcgggtgcgacgagtacttcctggagaagtaccccctgtcccagtacaagtacatccgcagctgcatcatgctcggccggatgcccaacctgatgctgatggccaaggagtccctctacagccagctgcccatggactgcttcaccatgccgtcctacagccgccggatctccaccgccaccccctacatgaacggggagacgagcaccaagagcctgtgggtgatcaactccgccctccgcatcaagatcctgtgcgcgacctacgtcaacgtgaacatccgggacatcgacaagatctacgtgcgcaccggcatctaccacgggggcgagcccctgtgcgacaacgtcaacacgcagcgcgtgccctgcagcaacccgcggtggaacgagtggctcaactacgacatctacatccccgacctgccccgcgccgcccggctgtgcctctccatctgcagcgtcaagggccgcaagggggccaaggaggagcactgccccctggcctggggcaacatcaacctgttcgactacaccgacaccctcgtgtccgggaagatggcgctgaacctgtggccggtgccccacggcctcgaggacctgctgaaccccatcggcgtcaccgggagcaacccgaacaaggagacgccctgcctggagctcgagttcgactggttctccagcgtggtgaagttccccgacatgtccgtcatcgaggagcacgccaactggagcgtgtcccgggaggccggcttcagctactcccacgccgggctgagcaaccgcctggcccgggacaacgagctccgcgagaacgacaaggagcagctgaaggcgatctccacccgggaccccctgagcgagatcaccgagcaggagaaggacttcctctggtcccaccgccactactgcgtgaccatcccggagatcctgcccaagctgctcctgagcgtcaagtggaactcccgggacgaggtggcccagatgtactgcctggtgaaggactggccgcccatcaagcccgagcaggccatggagctcctggactgcaactaccccgaccccatggtccgcggcttcgccgtgcggtgcctggagaagtacctcacggacgacaagctgagccagtacctgatccagctcgtgcaggtcctgaagtacgagcagtacctggacaacctcctggtgcgcttcctgctcaagaaggccctgaccaaccagcggatcgggcacttcttcttctggcacctgaagtccgagatgcacaacaagaccgtgtcccagcgcttcggcctcctgctggagagctactgccgggcgtgcggcatgtacctcaagcacctgaaccgccaggtcgaggccatggagaagctgatcaacctcaccgacatcctgaagcaggagaagaaggacgagacgcagaaggtgcagatgaagttcctggtggagcagatgcggcgccccgacttcatggacgccctccaggggttcctgtccccgctgaaccccgcccaccagctcggcaacctgcgcctggaggagtgccggatcatgagctccgccaagcgccccctctggctgaactgggagaaccccgacatcatgagcgagctcctcttccagaacaacgagatcatcttcaagaacggggacgacctgcggcaggacatgctgaccctccagatcatccgcatcatggagaacatctggcagaaccagggcctggacctgcggatgctcccgtacgggtgcctgtccatcggcgactgcgtcggcctgatcgaggtggtgcgcaacagccacaccatcatgcagatccagtgcaagggcgggctcaagggggcgctgcagttcaactcccacaccctgcaccagtggctcaaggacaagaacaagggcgagatctacgacgccgccatcgacctgttcacgcggagctgcgccgggtactgcgtcgcgaccttcatcctgggcatcggcgaccgccacaactccaacatcatggtgaaggacgacgggcagctgttccacatcgacttcggccacttcctggaccacaagaagaagaagttcgggtacaagcgggagcgcgtgcccttcgtcctgacccaggacttcctcatcgtgatcagcaagggcgcccaggagtgcaccaagacgcgggagttcgagcgcttccaggagatgtgctacaaggcctacctggccatccggcagcacgccaacctgttcatcaacctcttctccatgatgctgggcagcgggatgcccgagctgcagtccttcgacgacatcgcgtacatccgcaagaccctcgccctggacaagaccgagcaggaggccctggagtacttcatgaagcagatgaacgacgcccaccacggcgggtggaccacgaagatggactggatcttccacaccatcaagcagcacgccctcaactga

SEQ ID NO: 9210 - RNA, 3207 nt, synthetic construct
  misc_feature 1..3207: note = derived and/or modified sequence opt2 fromPI3K__Homo_sapiens__AAB39753
  source 1..3207: mol_type = other RNA
atgcccccccgcccctcctccggcgagctctggggcatccacctcatgcccccccgcatcctcgtcgagtgcctcctccccaacggcatgatcgtcaccctcgagtgcctccgcgaggccaccctcatcaccatcaagcacgagctcttcaaggaggcccgcaagtaccccctccaccagctcctccaggacgagtcctcctacatcttcgtctccgtcacccaggaggccgagcgcgaggagttcttcgacgagacccgccgcctctgcgacctccgcctcttccagcccttcctcaaggtcatcgagcccgtcggcaaccgcgaggagaagatcctcaaccgcgagatcggcttcgccatcggcatgcccgtctgcgagttcgacatggtcaaggaccccgaggtccaggacttccgccgcaacatcctcaacgtctgcaaggaggccgtcgacctccgcgacctcaactccccccactcccgcgccatgtacgtctacccccccaacgtcgagtcctcccccgagctccccaagcacatctacaacaagctcgacaagggccagatcatcgtcgtcatctgggtcatcgtctcccccaacaacgacaagcagaagtacaccctcaagatcaaccacgactgcgtccccgagcaggtcatcgccgaggccatccgcaagaagacccgctccatgctcctctcctccgagcagctcaagctctgcgtcctcgagtaccagggcaagtacatcctcaaggtctgcggctgcgacgagtacttcctcgagaagtaccccctctcccagtacaagtacatccgctcctgcatcatgctcggccgcatgcccaacctcatgctcatggccaaggagtccctctactcccagctccccatggactgcttcaccatgccctcctactcccgccgcatctccaccgccaccccctacatgaacggcgagacctccaccaagtccctctgggtcatcaactccgccctccgcatcaagatcctctgcgccacctacgtcaacgtcaacatccgcgacatcgacaagatctacgtccgcaccggcatctaccacggcggcgagcccctctgcgacaacgtcaacacccagcgcgtcccctgctccaacccccgctggaacgagtggctcaactacgacatctacatccccgacctcccccgcgccgcccgcctctgcctctccatctgctccgtcaagggccgcaagggcgccaaggaggagcactgccccctcgcctggggcaacatcaacctcttcgactacaccgacaccctcgtctccggcaagatggccctcaacctctggcccgtcccccacggcctcgaggacctcctcaaccccatcggcgtcaccggctccaaccccaacaaggagaccccctgcctcgagctcgagttcgactggttctcctccgtcgtcaagttccccgacatgtccgtcatcgaggagcacgccaactggtccgtctcccgcgaggccggcttctcctactcccacgccggcctctccaaccgcctcgcccgcgacaacgagctccgcgagaacgacaaggagcagctcaaggccatctccacccgcgaccccctctccgagatcaccgagcaggagaaggacttcctctggtcccaccgccactactgcgtcaccatccccgagatcctccccaagctcctcctctccgtcaagtggaactcccgcgacgaggtcgcccagatgtactgcctcgtcaaggactggccccccatcaagcccgagcaggccatggagctcctcgactgcaactaccccgaccccatggtccgcggcttcgccgtccgctgcctcgagaagtacctcaccgacgacaagctctcccagtacctcatccagctcgtccaggtcctcaagtacgagcagtacctcgacaacctcctcgtccgcttcctcctcaagaaggccctcaccaaccagcgcatcggccacttcttcttctggcacctcaagtccgagatgcacaacaagaccgtctcccagcgcttcggcctcctcctcgagtcctactgccgcgcctgcggcatgtacctcaagcacctcaaccgccaggtcgaggccatggagaagctcatcaacctcaccgacatcctcaagcaggagaagaaggacgagacccagaaggtccagatgaagttcctcgtcgagcagatgcgccgccccgacttcatggacgccctccagggcttcctctcccccctcaaccccgcccaccagctcggcaacctccgcctcgaggagtgccgcatcatgtcctccgccaagcgccccctctggctcaactgggagaaccccgacatcatgtccgagctcctcttccagaacaacgagatcatcttcaagaacggcgacgacctccgccaggacatgctcaccctccagatcatccgcatcatggagaacatctggcagaaccagggcctcgacctccgcatgctcccctacggctgcctctccatcggcgactgcgtcggcctcatcgaggtcgtccgcaactcccacaccatcatgcagatccagtgcaagggcggcctcaagggcgccctccagttcaactcccacaccctccaccagtggctcaaggacaagaacaagggcgagatctacgacgccgccatcgacctcttcacccgctcctgcgccggctactgcgtcgccaccttcatcctcggcatcggcgaccgccacaactccaacatcatggtcaaggacgacggccagctcttccacatcgacttcggccacttcctcgaccacaagaagaagaagttcggctacaagcgcgagcgcgtccccttcgtcctcacccaggacttcctcatcgtcatctccaagggcgcccaggagtgcaccaagacccgcgagttcgagcgcttccaggagatgtgctacaaggcctacctcgccatccgccagcacgccaacctcttcatcaacctcttctccatgatgctcggctccggcatgcccgagctccagtccttcgacgacatcgcctacatccgcaagaccctcgccctcgacaagaccgagcaggaggccctcgagtacttcatgaagcagatgaacgacgcccaccacggcggctggaccaccaagatggactggatcttccacaccatcaagcagcacgccctcaactga

SEQ ID NO: 9211 - RNA, 3207 nt, synthetic construct
  misc_feature 1..3207: note = derived and/or modified sequence opt3 fromPI3K__Homo_sapiens__AAB39753
  source 1..3207: mol_type = other RNA
atgccccctagaccaagctccggcgagctgtgggggatccacctcatgccgcccaggattcttgtggaatgcctgttgcctaacggaatgatagtcaccttagagtgtctgcgggaagccacactaatcactattaagcatgaactcttcaaagaagctcgcaagtacccactgcaccagcttctgcaagacgagtcttcatatatctttgttagtgtgacgcaggaggcagaacgagaggagttctttgatgagacccgtagattgtgcgacctcaggctgttccagccctttctgaaagtaattgagcctgtgggtaatcgggaagagaagatcctcaaccgcgaaataggcttcgccatcgggatgccagtctgtgagtttgatatggtgaaagaccccgaagttcaggatttcagaaggaatattttaaacgtgtgcaaggaggcggtcgacctgcgggatcttaatagccctcattcccgcgctatgtacgtgtatccaccgaacgtagagtcttcgcccgaattgcctaagcacatctacaataaactggacaagggacaaattatcgttgtgatatgggtcattgtgtcaccaaacaatgataaacagaagtatacactaaaaatcaaccatgactgtgtgcccgagcaggtcattgccgaagcaatccgaaagaagactagaagcatgctcctgagttccgagcagcttaaactgtgcgttttggaataccaaggcaagtatatcctcaaagtgtgtggttgcgatgagtactttctggagaagtaccctttatctcagtataaatacattaggagctgtataatgctggggcggatgccaaatctcatgcttatggccaaggaatccctgtattcacagttgcccatggactgcttcaccatgccgagttacagccgtcgcatctctacagctaccccttatatgaacggagagacttccacaaaatcactatgggtaattaatagcgcactgagaatcaagatactctgtgccacctacgtgaacgtcaatattagggatatcgacaagatctatgtgcggacgggcatttaccacggcggggaacccctgtgcgacaacgttaacactcagcgagtgccatgcagtaatcctcgctggaacgagtggcttaattacgatatctatattcccgacctgccaagagctgccaggttgtgtctctctatatgctccgtcaaaggacggaagggtgcgaaagaagaacactgtcccctggcatggggcaacatcaatttatttgattacaccgacacactggtgagcgggaagatggccctaaacctctggcctgtaccacatggactggaggatcttttgaatccgattggcgttactggttcgaaccccaataaagaaaccccttgcctggagctcgagttcgactggttttcttccgtggtcaagttcccagatatgtcagtgatcgaggagcacgctaactggagtgtcagccgcgaagccgggttctcctattctcatgcaggactgagcaatagacttgctagggacaacgagctgcgtgaaaatgataaggagcaattgaaagccatctcaacacgggaccccctcagtgaaattaccgagcaggagaaggattttctgtggtcccaccgacactactgtgtgacgatacctgaaatcttaccaaaactgctactcagcgttaagtggaactctagagacgaggtggcgcagatgtattgcctggtaaaagactggcccccgattaagcctgaacaagccatggagcttttggattgtaattacccagaccccatggtcaggggcttcgcagtgcgctgcctggaaaagtatctcactgatgacaaactgtcacagtacttaatccagctggttcaggtgcttaagtacgagcaatatttggataacctcctggtccggtttctactgaaaaaggctctcacaaaccagagaattggccatttctttttctggcacctgaaaagtgagatgcataataagaccgtgagccagaggtttgggcttttgctggaatcctactgtcgcgcctgcggaatgtatttaaagcacctcaaccgacaggtagaggctatggaaaaactgatcaatcttactgacatactgaagcaagagaaaaaggatgaaacacagaaagtgcagatgaagttcttggttgagcagatgcggcgtcctgactttatggatgccctccaaggtttcctgtctcccctaaacccagcacatcagctgggcaatctcagactggaggaatgtaggatcatgtcgagcgccaaacgccctctttggttgaactgggagaatcccgacattatgtccgaactgttatttcagaacaatgagatcattttcaagaacggggatgacctccggcaggatatgctgacccttcaaatcataagaattatggagaatatctggcagaaccagggactggacctaaggatgctcccatacggctgcctgtcaattggtgactgcgtcgggttgatcgaagtggtgcgaaatagtcacacgataatgcaaatccagtgtaagggcggactgaaaggcgctttacagtttaactctcacaccctccatcagtggctgaaggataaaaataagggggagatttatgacgcggcaatcgatcttttcacacgcagctgcgccggatactgtgtcgctactttcattctgggtatcggcgaccggcacaactccaacataatggttaaagatgacgggcaattgtttcatattgatttcggacactttctcgaccacaagaagaaaaagttcggctataaaagagaaagggtgccgtttgtgctgacccaggatttcctaatcgtaatctcaaagggtgcccaggagtgcacaaaaactcgtgaatttgagcgcttccaggagatgtgttacaaggcatacctggccattcggcaacatgctaatctttttatcaacctcttcagcatgatgctggggtctggcatgcctgaattgcagtcctttgacgatattgcctatataagaaagaccctggcattagacaaaacagagcaggaagcgctcgagtacttcatgaagcagatgaatgatgctcaccatggaggctggaccactaaaatggactggatctttcacacgattaagcaacatgccctgaactga

SEQ ID NO: 9212 - RNA, 3207 nt, synthetic construct
  misc_feature 1..3207: note = derived and/or modified sequence opt4 fromPI3K__Homo_sapiens__AAB39753
  source 1..3207: mol_type = other RNA
atgccccccagacccagcagcggcgagctgtggggcatccacctgatgccccccagaatcctggtggagtgcctgctgcccaacggcatgatcgtgaccctggagtgcctgagagaggccaccctgatcaccatcaagcacgagctgttcaaggaggccagaaagtaccccctgcaccagctgctgcaggacgagagcagctacatcttcgtgagcgtgacccaggaggccgagagagaggagttcttcgacgagaccagaagactgtgcgacctgagactgttccagcccttcctgaaggtgatcgagcccgtgggcaacagagaggagaagatcctgaacagagagatcggcttcgccatcggcatgcccgtgtgcgagttcgacatggtgaaggaccccgaggtgcaggacttcagaagaaacatcctgaacgtgtgcaaggaggccgtggacctgagagacctgaacagcccccacagcagagccatgtacgtgtacccccccaacgtggagagcagccccgagctgcccaagcacatctacaacaagctggacaagggccagatcatcgtggtgatctgggtgatcgtgagccccaacaacgacaagcagaagtacaccctgaagatcaaccacgactgcgtgcccgagcaggtgatcgccgaggccatcagaaagaagaccagaagcatgctgctgagcagcgagcagctgaagctgtgcgtgctggagtaccagggcaagtacatcctgaaggtgtgcggctgcgacgagtacttcctggagaagtaccccctgagccagtacaagtacatcagaagctgcatcatgctgggcagaatgcccaacctgatgctgatggccaaggagagcctgtacagccagctgcccatggactgcttcaccatgcccagctacagcagaagaatcagcaccgccaccccctacatgaacggcgagaccagcaccaagagcctgtgggtgatcaacagcgccctgagaatcaagatcctgtgcgccacctacgtgaacgtgaacatcagagacatcgacaagatctacgtgagaaccggcatctaccacggcggcgagcccctgtgcgacaacgtgaacacccagagagtgccctgcagcaaccccagatggaacgagtggctgaactacgacatctacatccccgacctgcccagagccgccagactgtgcctgagcatctgcagcgtgaagggcagaaagggcgccaaggaggagcactgccccctggcctggggcaacatcaacctgttcgactacaccgacaccctggtgagcggcaagatggccctgaacctgtggcccgtgccccacggcctggaggacctgctgaaccccatcggcgtgaccggcagcaaccccaacaaggagaccccctgcctggagctggagttcgactggttcagcagcgtggtgaagttccccgacatgagcgtgatcgaggagcacgccaactggagcgtgagcagagaggccggcttcagctacagccacgccggcctgagcaacagactggccagagacaacgagctgagagagaacgacaaggagcagctgaaggccatcagcaccagagaccccctgagcgagatcaccgagcaggagaaggacttcctgtggagccacagacactactgcgtgaccatccccgagatcctgcccaagctgctgctgagcgtgaagtggaacagcagagacgaggtggcccagatgtactgcctggtgaaggactggccccccatcaagcccgagcaggccatggagctgctggactgcaactaccccgaccccatggtgagaggcttcgccgtgagatgcctggagaagtacctgaccgacgacaagctgagccagtacctgatccagctggtgcaggtgctgaagtacgagcagtacctggacaacctgctggtgagattcctgctgaagaaggccctgaccaaccagagaatcggccacttcttcttctggcacctgaagagcgagatgcacaacaagaccgtgagccagagattcggcctgctgctggagagctactgcagagcctgcggcatgtacctgaagcacctgaacagacaggtggaggccatggagaagctgatcaacctgaccgacatcctgaagcaggagaagaaggacgagacccagaaggtgcagatgaagttcctggtggagcagatgagaagacccgacttcatggacgccctgcagggcttcctgagccccctgaaccccgcccaccagctgggcaacctgagactggaggagtgcagaatcatgagcagcgccaagagacccctgtggctgaactgggagaaccccgacatcatgagcgagctgctgttccagaacaacgagatcatcttcaagaacggcgacgacctgagacaggacatgctgaccctgcagatcatcagaatcatggagaacatctggcagaaccagggcctggacctgagaatgctgccctacggctgcctgagcatcggcgactgcgtgggcctgatcgaggtggtgagaaacagccacaccatcatgcagatccagtgcaagggcggcctgaagggcgccctgcagttcaacagccacaccctgcaccagtggctgaaggacaagaacaagggcgagatctacgacgccgccatcgacctgttcaccagaagctgcgccggctactgcgtggccaccttcatcctgggcatcggcgacagacacaacagcaacatcatggtgaaggacgacggccagctgttccacatcgacttcggccacttcctggaccacaagaagaagaagttcggctacaagagagagagagtgcccttcgtgctgacccaggacttcctgatcgtgatcagcaagggcgcccaggagtgcaccaagaccagagagttcgagagattccaggagatgtgctacaaggcctacctggccatcagacagcacgccaacctgttcatcaacctgttcagcatgatgctgggcagcggcatgcccgagctgcagagcttcgacgacatcgcctacatcagaaagaccctggccctggacaagaccgagcaggaggccctggagtacttcatgaagcagatgaacgacgcccaccacggcggctggaccaccaagatggactggatcttccacaccatcaagcagcacgccctgaactga

SEQ ID NO: 9213 - RNA, 3207 nt, synthetic construct
  misc_feature 1..3207: note = derived and/or modified sequence opt5 fromPI3K__Homo_sapiens__AAB39753
  source 1..3207: mol_type = other RNA
atgccccctagaccgagctccggcgagctgtgggggatccacctcatgccccctcggattctggtggaatgccttctgcccaacggaatgatcgtcaccctcgagtgtctgcgcgaagccacacttattacgatcaagcatgagctgttcaaagaagctagaaagtaccctctccaccagctgctgcaagacgagtctagctatatttttgtttccgtgacccaggaggccgaacgggaggagttctttgatgagacacgcagactctgcgacctgcggcttttccagccctttctgaaagtgatcgagcctgtcggcaatcgcgaagagaagatcctcaacagagaaattgggttcgcgatcggaatgccggtgtgtgagtttgatatggttaaagaccccgaagtgcaggatttccggcgcaatattctgaacgtctgcaaggaggctgtggaccttagagatctcaattctcctcatagccgggccatgtacgtttatccccctaacgtggagtcctctcccgaactgccgaagcacatctacaataaactggacaagggccaaattatcgtcgtgatttgggtgatcgtcagccctaacaatgataaacagaagtataccctgaaaatcaaccatgactgtgttcccgaacaggtgattgccgaagctatccgcaagaagacaagatccatgctcctgagctctgagcagcttaaactgtgcgtgctcgaataccaagggaagtatattctgaaagtctgtggatgcgatgagtactttcttgagaagtaccctctgtcccagtataaatacatccggagctgtattatgctcggccgcatgcccaatctgatgctgatggccaaggaatctctctattcccagctgcccatggactgcttcaccatgcctagctactctagacggatctccacagctaccccgtatatgaacggcgagacgagcaccaaatccctttgggtgatcaattctgccctgagaattaagatcctctgtgcgacatacgttaacgtgaatattcgcgatatcgacaagatttatgtccggaccgggatctaccacggaggcgaacccctgtgcgacaacgtgaacacacagagagttccttgcagcaatccccgctggaacgagtggcttaattacgatatctatattcctgacctgccccgggccgctagactctgtctgtccatctgcagcgtgaaagggcgcaagggagccaaagaagaacactgtccgctggcttggggcaacattaatctctttgattacaccgacacgctggtctctgggaagatggcccttaacctgtggcctgtgccccatggactcgaggatctgctgaatcctatcggcgtcacaggctccaaccccaataaagaaaccccttgccttgagctcgagttcgactggtttagctctgtggttaagttccccgatatgagcgtgattgaggagcacgcgaactggtccgtctctcgggaagccgggttcagctattcccatgctggactgagcaatagactggcccgcgacaacgagctccgggaaaatgataaggagcaactgaaagctatctctacaagagacccgctttccgaaattaccgagcaggagaaggattttctgtggagccaccgccactactgtgtgaccatccctgaaatcctccccaaactgctgctttctgttaagtggaactcccgggacgaggtggcccagatgtattgcctcgtcaaagactggccccctattaagccggaacaagccatggagctgctggattgtaattaccccgaccctatggtgagaggcttcgctgtgcggtgcctcgaaaagtatctgacagatgacaaacttagccagtacctgatccagctcgttcaggtcctgaagtacgagcaatatctggataaccttctcgtgcgctttctgctgaaaaaggcgctcacgaaccagagaattgggcatttctttttctggcacctgaaatccgagatgcataataagaccgtgtctcagcggtttggacttctgctcgaaagctactgtagagcctgcggcatgtatctgaagcacctgaaccgccaggtcgaggctatggaaaaacttatcaatctcacagacattctgaagcaagagaaaaaggatgaaacccagaaagtgcagatgaagttcctggttgagcagatgcggagacccgactttatggatgccctccaagggttcctgtcccctcttaaccccgcccatcagctgggaaatctccgcctggaggaatgtagaatcatgtctagcgctaaacggcctctgtggcttaactgggagaatcccgacatcatgtccgaactgctctttcagaacaatgagattatcttcaagaacggcgatgacctgcgccaggatatgctcacactgcaaattatcagaattatggagaatatctggcagaaccagggccttgacctgcggatgctcccgtacgggtgcctgagcatcggagactgcgtgggcctgattgaagtcgtgcgcaattctcacaccatcatgcaaattcagtgtaaagggggacttaagggcgccctgcagtttaactcccacacgctccatcagtggctgaaggataaaaataagggggagatctatgacgcggctattgatctcttcacaagaagctgcgccggctactgtgttgccaccttcatcctgggaatcggcgaccggcacaactctaacattatggtgaaagatgacgggcaactttttcatatcgatttcggacactttctggaccacaagaagaaaaagttcggctataaacgcgaaagagtcccttttgtgctcacccaggatttcctgattgttatctccaagggggctcaggagtgcacaaaaacccgggaatttgagcgcttccaggagatgtgttacaaggcctacctggctattagacaacatgccaatctttttatcaacctgttcagcatgatgctcggatctggcatgcccgaactgcagagctttgacgatattgcgtatatccggaagacactcgccctggacaaaacggagcaggaagctcttgagtacttcatgaagcagatgaatgatgcccaccatgggggctggaccacaaaaatggactggatctttcacaccattaagcaacatgctctgaactga

SEQ ID NO: 9214 - protein, 1070 aa, synthetic construct
  REGION 1..1070: note = PI3K__Homo_sapiens__P42338
MCFSFIMPPAMADILDIWAVDSQIASDGSIPVDFLLPTGIYIQLEVPREATISYIKQMLWKQVHNYPMFNLLMDIDSYMFACVNQTAVYEELEDETRRLCDVRPFLPVLKLVTRSCDPGEKLDSKIGVLIGKGLHEFDSLKDPEVNEFRRKMRKFSEEKILSLVGLSWMDWLKQTYPPEHEPSIPENLEDKLYGGKLIVAVHFENCQDVFSFQVSPNMNPIKVNELAIQKRLTIHGKEDEVSPYDYVLQVSGRVEYVFGDHPLIQFQYIRNCVMNRALPHFILVECCKIKKMYEQEMIAIEAAINRNSSNLPLPLPPKKTRIISHVWENNNPFQIVLVKGNKLNTEETVKVHVRAGLFHGTELLCKTIVSSEVSGKNDHIWNEPLEFDINICDLPRMARLCFAVYAVLDKVKTKKSTKTINPSKYQTIRKAGKVHYPVAWVNTMVFDFKGQLRTGDIILHSWSSFPDELEEMLNPMGTVQTNPYTENATALHVKFPENKKQPYYYPPFDKIIEKAAEIASSDSANVSSRGGKKFLPVLKEILDRDPLSQLCENEMDLIWTLRQDCREIFPQSLPKLLLSIKWNKLEDVAQLQALLQIWPKLPPREALELLDFNYPDQYVREYAVGCLRQMSDEELSQYLLQLVQVLKYEPFLDCALSRFLLERALGNRRIGQFLFWHLRSEVHIPAVSVQFGVILEAYCRGSVGHMKVLSKQVEALNKLKTLNSLIKLNAVKLNRAKGKEAMHTCLKQSAYREALSDLQSPLNPCVILSELYVEKCKYMDSKMKPLWLVYNNKVFGEDSVGVIFKNGDDLRQDMLTLQMLRLMDLLWKEAGLDLRMLPYGCLATGDRSGLIEVVSTSETIADIQLNSSNVAAAAAFNKDALLNWLKEYNSGDDLDRAIEEFTLSCAGYCVASYVLGIGDRHSDNIMVKKTGQLFHIDFGHILGNFKSKFGIKRERVPFILTYDFIHVIQQGKTGNTEKFGRFRQCCEDAYLILRRHGNLFITLFALMLTAGLPELTSVKDIQYLKDSLALGKSEEEALKQFKQKFDEALRESWTTKVNWMAHTVRKDYRS

SEQ ID NO: 9215 - RNA, 3213 nt, synthetic construct
  misc_feature 1..3213: note = PI3K__Homo_sapiens__AAB29081
  source 1..3213: mol_type = other RNA
atgtgcttcagtttcataatgcctcctgctatggcagacatccttgacatctgggcggtggattcacagatagcatctgatggctccatacctgtggatttccttttgcccactgggatttatatccagttggaggtacctcgggaagctaccatttcttatattaagcagatgttatggaagcaagttcacaattacccaatgttcaacctccttatggatattgactcctatatgtttgcatgtgtgaatcagactgctgtatatgaggagcttgaagatgaaacacgaagactctgtgatgtcagaccttttcttccagttctcaaattagtgacaagaagttgtgacccaggggaaaaattagactcaaaaattggagtccttataggaaaaggtctgcatgaatttgattccttgaaggatcctgaagtaaatgaatttcgaagaaaaatgcgcaaattcagcgaggaaaaaatcctgtcacttgtgggattgtcttggatggactggctaaaacaaacatatccaccagagcatgaaccatccatccctgaaaacttagaagataaactttatgggggaaagctcatcgtagctgttcattttgaaaactgccaggacgtgtttagctttcaagtgtctcctaatatgaatcctatcaaagtaaatgaattggcaatccaaaaacgtttgactattcatgggaaggaagatgaagttagcccctatgattatgtgttgcaagtcagcgggagagtagaatatgtttttggtgatcatccactaattcagttccagtatatccggaactgtgtgatgaacagagccctgccccattttatacttgtggaatgctgcaagatcaagaaaatgtatgaacaagaaatgattgccatagaggctgccataaatcgaaattcatctaatcttcctcttccattaccaccaaagaaaacacgaattatttctcatgtttgggaaaataacaaccctttccaaattgtcttggttaagggaaataaacttaacacagaggaaactgtaaaagttcatgtcagggctggtctttttcatggtactgagctcctgtgtaaaaccatcgtaagctcagaggtatcagggaaaaatgatcatatttggaatgaaccactggaatttgatattaatatttgtgacttaccaagaatggctcgattatgttttgctgtttatgcagttttggataaagtaaaaacgaagaaatcaacgaaaactattaatccctctaaatatcagaccatcaggaaagctggaaaagtgcattatcctgtagcgtgggtaaatacgatggtttttgactttaaaggacaattgagaactggagacataatattacacagctggtcttcatttcctgatgaactcgaagaaatgttgaatccaatgggaactgttcaaacaaatccatatactgaaaatgcaacagctttgcatgttaaatttccagagaataaaaaacaaccttattattaccctcccttcgataagattattgaaaaggcagctgagattgcaagcagtgatagtgctaatgtgtcaagtcgaggtggaaaaaagtttcttcctgtattgaaagaaatcttggacagggatcccttgtctcaactgtgtgaaaatgaaatggatcttatttggactttgcgacaagactgccgagagattttcccacaatcactgccaaaattactgctgtcaatcaagtggaataaacttgaggatgttgctcagcttcaggcgctgcttcagatttggcctaaactgcccccccgggaggccctagagcttctggatttcaactatccagaccagtacgttcgagaatatgctgtaggctgcctgcgacagatgagtgatgaagaactttctcaatatcttttacaactggtgcaagtgttaaaatatgagccttttcttgattgtgccctctctagattcctattagaaagagcacttggtaatcggaggatagggcagtttctattttggcatcttaggtcagaagtgcacattcctgctgtctcagtacaatttggtgtcatccttgaagcatactgccggggaagtgtggggcacatgaaagtgctttctaagcaggttgaagcactcaataagttaaaaactttaaatagtttaatcaaactgaatgccgtgaagttaaacagagccaaagggaaggaggccatgcatacctgtttaaaacagagtgcttaccgggaagccctctctgacctgcagtcacccctgaacccatgtgttatcctctcagaactctatgttgaaaagtgcaaatacatggattccaaaatgaagcctttgtggctggtatacaataacaaggtatttggtgaggattcagttggagtgatttttaaaaatggtgatgatttacgacaggatatgttgacactccaaatgttgcgcttgatggatttactctggaaagaagctggtttggatcttcggatgttgccttatggctgtttagcaacaggagatcgctctggcctcattgaagttgtgagcacctctgaaacaattgctgacattcagctgaacagtagcaatgtggctgctgcagcagccttcaacaaagatgcccttctgaactggcttaaagaatacaactctggggatgacctggaccgagccattgaggaatttacactgtcctgtgctggctactgtgtagcttcttatgtccttgggattggtgacagacatagtgacaacatcatggtcaaaaaaactggccagctcttccacattgactttggacatattcttggaaatttcaaatctaagtttggcattaaaagggagcgagtgccttttattcttacctatgatttcatccatgtcattcaacaaggaaaaacaggaaatacagaaaagtttggccggttccgccagtgttgtgaggatgcatatctgattttacgacggcatgggaatctcttcatcactctctttgcgctgatgttgactgcagggcttcctgaactcacatcagtcaaagatatacagtatcttaaggactctcttgcattagggaagagtgaagaagaagcactcaaacagtttaagcaaaaatttgatgaggcgctcagggaaagctggactactaaagtgaactggatggcccacacagttcggaaagactacagatcttaa

SEQ ID NO: 9216 - RNA, 3213 nt, synthetic construct
  misc_feature 1..3213: note = derived and/or modified sequence opt1 fromPI3K__Homo_sapiens__AAB29081
  source 1..3213: mol_type = other RNA
atgtgcttcagcttcatcatgcccccggccatggccgacatcctggacatctgggcggtggactcccagatcgccagcgacggctccatccccgtcgacttcctcctgcccaccgggatctacatccagctggaggtgccccgcgaggccaccatcagctacatcaagcagatgctctggaagcaggtccacaactacccgatgttcaacctgctgatggacatcgactcctacatgttcgcctgcgtgaaccagacggccgtgtacgaggagctcgaggacgagacccggcgcctgtgcgacgtgcggcccttcctgcccgtcctcaagctggtgacccgcagctgcgaccccggcgagaagctggactccaagatcggggtgctcatcggcaaggggctgcacgagttcgacagcctgaaggacccggaggtcaacgagttccggcgcaagatgcggaagttctccgaggagaagatcctcagcctggtgggcctgtcctggatggactggctcaagcagacctacccgcccgagcacgagcccagcatccccgagaacctggaggacaagctgtacggcgggaagctcatcgtggcggtccacttcgagaactgccaggacgtgttctccttccaggtgagccccaacatgaaccccatcaaggtcaacgagctggccatccagaagcgcctgacgatccacggcaaggaggacgaggtgtccccctacgactacgtgctccaggtcagcgggcgggtggagtacgtgttcggcgaccacccgctgatccagttccagtacatccgcaactgcgtcatgaaccgggccctgccccacttcatcctcgtggagtgctgcaagatcaagaagatgtacgagcaggagatgatcgccatcgaggcggccatcaaccgcaactccagcaacctgcccctgcccctcccgcccaagaagacccggatcatctcccacgtgtgggagaacaacaaccccttccagatcgtcctggtgaaggggaacaagctgaacaccgaggagaccgtcaaggtgcacgtgcgcgccggcctcttccacggcacggagctgctgtgcaagaccatcgtcagcagcgaggtgtccgggaagaacgaccacatctggaacgagcccctcgagttcgacatcaacatctgcgacctgccgcggatggcccgcctgtgcttcgccgtgtacgcggtcctcgacaaggtgaagaccaagaagtccaccaagacgatcaaccccagcaagtaccagaccatccggaaggccggcaaggtgcactaccccgtcgcctgggtgaacaccatggtgttcgacttcaaggggcagctgcgcaccggcgacatcatcctgcacagctggtccagcttccccgacgagctcgaggagatgctgaacccgatgggcacggtccagaccaacccctacaccgagaacgccaccgccctgcacgtgaagttccccgagaacaagaagcagccgtactactacccgcccttcgacaagatcatcgagaaggcggccgagatcgcctccagcgactccgccaacgtgagctcccgcgggggcaagaagttcctccccgtcctgaaggagatcctggaccgggaccccctcagccagctgtgcgagaacgagatggacctgatctggacgctgcggcaggactgccgcgagatcttcccccagtccctccccaagctgctgctcagcatcaagtggaacaagctggaggacgtggcccagctgcaggcgctcctgcagatctggcccaagctgccgccccgcgaggccctcgagctgctggacttcaactaccccgaccagtacgtgcgggagtacgccgtcgggtgcctccgccagatgtccgacgaggagctgagccagtacctgctccagctggtccaggtgctgaagtacgagcccttcctcgactgcgccctgtcccggttcctgctcgagcgcgccctgggcaaccggcgcatcgggcagttcctgttctggcacctccggagcgaggtgcacatcccggcggtgtccgtgcagttcggcgtcatcctggaggcctactgccgcggcagcgtggggcacatgaaggtgctgagcaagcaggtcgaggccctcaacaagctgaagaccctgaactccctcatcaagctgaacgccgtgaagctgaaccgggcgaagggcaaggaggccatgcacacgtgcctcaagcagagcgcctaccgcgaggccctgtccgacctgcagagccccctcaacccctgcgtgatcctgtccgagctgtacgtcgagaagtgcaagtacatggacagcaagatgaagcccctctggctggtgtacaacaacaaggtgttcggggaggactccgtcggcgtgatcttcaagaacggggacgacctgcggcaggacatgctcaccctgcagatgctgcgcctcatggacctgctgtggaaggaggccggcctcgacctgcggatgctgccgtacggctgcctcgcgacgggggaccgcagcggcctgatcgaggtggtctccaccagcgagaccatcgccgacatccagctgaactccagcaacgtggccgccgccgcggccttcaacaaggacgccctcctgaactggctgaaggagtacaactccggggacgacctcgaccgggccatcgaggagttcaccctgagctgcgccggctactgcgtggcgtcctacgtcctggggatcggcgaccgccacagcgacaacatcatggtgaagaagacgggccagctgttccacatcgacttcgggcacatcctcggcaacttcaagtccaagttcgggatcaagcgggagcgcgtgcccttcatcctgacctacgacttcatccacgtcatccagcagggcaagaccggcaacaccgagaagttcgggcggttccgccagtgctgcgaggacgcctacctcatcctgcgccggcacggcaacctgttcatcaccctcttcgccctgatgctgaccgccgggctccccgagctgaccagcgtgaaggacatccagtacctgaaggacagcctcgcgctgggcaagtccgaggaggaggccctgaagcagttcaagcagaagttcgacgaggccctccgcgagagctggaccacgaaggtgaactggatggcccacaccgtccggaaggactaccgctcctga

SEQ ID NO: 9217 - RNA, 3213 nt, synthetic construct
  misc_feature 1..3213: note = derived and/or modified sequence opt2 fromPI3K__Homo_sapiens__AAB29081
  source 1..3213: mol_type = other RNA
atgtgcttctccttcatcatgccccccgccatggccgacatcctcgacatctgggccgtcgactcccagatcgcctccgacggctccatccccgtcgacttcctcctccccaccggcatctacatccagctcgaggtcccccgcgaggccaccatctcctacatcaagcagatgctctggaagcaggtccacaactaccccatgttcaacctcctcatggacatcgactcctacatgttcgcctgcgtcaaccagaccgccgtctacgaggagctcgaggacgagacccgccgcctctgcgacgtccgccccttcctccccgtcctcaagctcgtcacccgctcctgcgaccccggcgagaagctcgactccaagatcggcgtcctcatcggcaagggcctccacgagttcgactccctcaaggaccccgaggtcaacgagttccgccgcaagatgcgcaagttctccgaggagaagatcctctccctcgtcggcctctcctggatggactggctcaagcagacctacccccccgagcacgagccctccatccccgagaacctcgaggacaagctctacggcggcaagctcatcgtcgccgtccacttcgagaactgccaggacgtcttctccttccaggtctcccccaacatgaaccccatcaaggtcaacgagctcgccatccagaagcgcctcaccatccacggcaaggaggacgaggtctccccctacgactacgtcctccaggtctccggccgcgtcgagtacgtcttcggcgaccaccccctcatccagttccagtacatccgcaactgcgtcatgaaccgcgccctcccccacttcatcctcgtcgagtgctgcaagatcaagaagatgtacgagcaggagatgatcgccatcgaggccgccatcaaccgcaactcctccaacctccccctccccctcccccccaagaagacccgcatcatctcccacgtctgggagaacaacaaccccttccagatcgtcctcgtcaagggcaacaagctcaacaccgaggagaccgtcaaggtccacgtccgcgccggcctcttccacggcaccgagctcctctgcaagaccatcgtctcctccgaggtctccggcaagaacgaccacatctggaacgagcccctcgagttcgacatcaacatctgcgacctcccccgcatggcccgcctctgcttcgccgtctacgccgtcctcgacaaggtcaagaccaagaagtccaccaagaccatcaacccctccaagtaccagaccatccgcaaggccggcaaggtccactaccccgtcgcctgggtcaacaccatggtcttcgacttcaagggccagctccgcaccggcgacatcatcctccactcctggtcctccttccccgacgagctcgaggagatgctcaaccccatgggcaccgtccagaccaacccctacaccgagaacgccaccgccctccacgtcaagttccccgagaacaagaagcagccctactactacccccccttcgacaagatcatcgagaaggccgccgagatcgcctcctccgactccgccaacgtctcctcccgcggcggcaagaagttcctccccgtcctcaaggagatcctcgaccgcgaccccctctcccagctctgcgagaacgagatggacctcatctggaccctccgccaggactgccgcgagatcttcccccagtccctccccaagctcctcctctccatcaagtggaacaagctcgaggacgtcgcccagctccaggccctcctccagatctggcccaagctccccccccgcgaggccctcgagctcctcgacttcaactaccccgaccagtacgtccgcgagtacgccgtcggctgcctccgccagatgtccgacgaggagctctcccagtacctcctccagctcgtccaggtcctcaagtacgagcccttcctcgactgcgccctctcccgcttcctcctcgagcgcgccctcggcaaccgccgcatcggccagttcctcttctggcacctccgctccgaggtccacatccccgccgtctccgtccagttcggcgtcatcctcgaggcctactgccgcggctccgtcggccacatgaaggtcctctccaagcaggtcgaggccctcaacaagctcaagaccctcaactccctcatcaagctcaacgccgtcaagctcaaccgcgccaagggcaaggaggccatgcacacctgcctcaagcagtccgcctaccgcgaggccctctccgacctccagtcccccctcaacccctgcgtcatcctctccgagctctacgtcgagaagtgcaagtacatggactccaagatgaagcccctctggctcgtctacaacaacaaggtcttcggcgaggactccgtcggcgtcatcttcaagaacggcgacgacctccgccaggacatgctcaccctccagatgctccgcctcatggacctcctctggaaggaggccggcctcgacctccgcatgctcccctacggctgcctcgccaccggcgaccgctccggcctcatcgaggtcgtctccacctccgagaccatcgccgacatccagctcaactcctccaacgtcgccgccgccgccgccttcaacaaggacgccctcctcaactggctcaaggagtacaactccggcgacgacctcgaccgcgccatcgaggagttcaccctctcctgcgccggctactgcgtcgcctcctacgtcctcggcatcggcgaccgccactccgacaacatcatggtcaagaagaccggccagctcttccacatcgacttcggccacatcctcggcaacttcaagtccaagttcggcatcaagcgcgagcgcgtccccttcatcctcacctacgacttcatccacgtcatccagcagggcaagaccggcaacaccgagaagttcggccgcttccgccagtgctgcgaggacgcctacctcatcctccgccgccacggcaacctcttcatcaccctcttcgccctcatgctcaccgccggcctccccgagctcacctccgtcaaggacatccagtacctcaaggactccctcgccctcggcaagtccgaggaggaggccctcaagcagttcaagcagaagttcgacgaggccctccgcgagtcctggaccaccaaggtcaactggatggcccacaccgtccgcaaggactaccgctcctga

SEQ ID NO: 9218 - RNA, 3213 nt, synthetic construct
  misc_feature 1..3213: note = derived and/or modified sequence opt3 fromPI3K__Homo_sapiens__AAB29081
  source 1..3213: mol_type = other RNA
atgtgcttcagctttatcatgccccctgccatggctgacattctggatatatgggcagtggactcccagatcgcctctgatggctcaattccagtcgacttcctccttccgaccgggatctacattcaactggaggttcccagagaagcgacaatcagttatataaagcagatgttgtggaaacaggtgcacaactaccctatgtttaatttactgatggatatcgacagctatatgttcgcttgtgtaaaccagactgccgtgtacgaggaactagaggatgaaacgaggcggctctgcgacgtccgcccatttctgcccgtgcttaagctggttacccgatcctgtgatcctggagagaaattggactctaagattggtgtgctcatcggcaaagggctgcatgagttcgattcgctgaaggacccagaagtcaatgagtttcgtagaaagatgaggaaattctcagaagagaagattctcagcttagtgggactgagttggatggattggcttaaacaaacatatccccctgagcacgaaccatccatcccggagaacttggaagacaagctgtacggcggtaaactaatagtagcagttcattttgagaattgccaggacgtgttctcttttcaggtcagccccaacatgaatcctattaaggtgaacgaactcgccatccagaagcggctgactattcacgggaaagaggatgaggtgtccccatatgactacgtccttcaagtttcaggacgcgtggaatacgtattcggcgatcatcccctgatccagtttcagtatatcagaaattgtgtgatgaacagggctttgcctcacttcattctcgtcgagtgctgtaagatcaaaaagatgtacgaacaggagatgatagcaattgaagccgctatcaatcggaacagtagcaatctgccattacccctgccgcctaaaaagacccgcataatttctcacgtgtgggagaacaataaccccttccaaatcgttctcgtgaaaggcaacaagttgaatacagaggaaaccgtcaaggtgcatgtacgagccgggctgtttcacggaactgagttgctatgcaaaacaatcgtttcctcagaagtgagcggtaagaacgaccatatttggaatgagccactggagttcgatatcaacatttgtgacctccctagaatggcgaggctgtgctttgcagtctatgccgtgcttgataaagtcaagaccaaaaagagtacgaagactataaatccctctaaataccagaccatccggaaggctggcaaagtgcactatccagttgcctgggtgaacacaatggtattcgactttaaggggcagctgcgtactggagatattatcttgcactcctggagctcgttccccgacgaactcgaggaaatgctgaatcctatgggcaccgtccaaacaaacccatacaccgagaatgcaacggctttacatgtgaaatttccggaaaacaagaagcagccctattactaccctccattcgataaaatcattgagaaggccgcggagatagcctcttccgactcagcaaatgttagtagccgcggtgggaaaaagtttctgcccgtgctaaaagaaatcctcgacagagatcctctgtcccagctttgtgagaacgaaatggacttgatttggactctgaggcaggattgccgggagatcttcccacaatctctccccaagctgcttctgagcattaagtggaataaattggaagacgtcgctcagctccaggccctgttacagatctggccgaagctgcctccacgagaggctctagagctcctggattttaactatcccgaccaatacgtgcgcgaatatgccgtaggatgccttagacagatgtcagatgaggaattgagtcagtacctgctccagctggtgcaagttttaaaatatgagcctttcctggactgtgcactttccaggtttttgctcgaacgggccctgggcaatcgcagaataggccagttcctattctggcacctgaggagcgaggtccatatccccgctgtgtctgtgcagtttggggtcattctcgaggcgtactgccgtggatcagttggtcacatgaaggtgctgagtaaacaggtggaagcacttaacaagttgaaaacactgaacagcttaatcaagctcaatgccgtaaagctgaaccgggctaaaggcaaggaggccatgcatacctgtcttaaacaatccgcatatcgagaagccctgtctgatttgcagtcgccactcaatccttgcgtcattctgagcgagctatacgtggaaaagtgtaaatacatggactccaagatgaagcccctgtggctcgtttataacaataaagtgttcggggaggattcagtcggagtgatctttaagaacggcgacgatctgagacaggacatgcttactttgcaaatgctgaggttaatggacctcctgtggaaagaggctggtcttgatctgcgcatgctaccatacgggtgcctcgccacaggcgaccggagtggactgatagaagttgtgtctaccagcgagacgattgcagatatccagcttaattcctcaaacgtagcggctgccgcagccttcaataaggacgctctgttaaactggctcaaagaatataatagcggcgatgacctggatagagccattgaggagtttaccctttcttgtgcagggtactgcgtcgcttcctatgtgctgggaatcggtgacaggcacagtgataacataatggtgaagaagacaggccagttgttccacatcgactttgggcatattctcggaaatttcaaaagcaagtttggcatcaaacgcgaacgagtcccgttcattctgacttacgattttatccacgttatacagcaaggtaagaccgggaacacagagaaattcggccggtttcgtcagtgttgcgaagacgcctatctaattctgagaaggcatggaaatcttttcatcactctcttcgcgctgatgttgaccgccggcctgcctgagttaacatctgtgaaggatatccagtacctcaaggactccctggctcttgggaaatcagaagaggaggcactgaagcagtttaaacaaaagttcgacgaagccttgcgcgagagttggaccactaaagtaaactggatggctcacacggtgcggaaggattacagaagctga

SEQ ID NO: 9219 - RNA, 3213 nt, synthetic construct
  misc_feature 1..3213: note = derived and/or modified sequence opt4 fromPI3K__Homo_sapiens__AAB29081
  source 1..3213: mol_type = other RNA
atgtgcttcagcttcatcatgccccccgccatggccgacatcctggacatctgggccgtggacagccagatcgccagcgacggcagcatccccgtggacttcctgctgcccaccggcatctacatccagctggaggtgcccagagaggccaccatcagctacatcaagcagatgctgtggaagcaggtgcacaactaccccatgttcaacctgctgatggacatcgacagctacatgttcgcctgcgtgaaccagaccgccgtgtacgaggagctggaggacgagaccagaagactgtgcgacgtgagacccttcctgcccgtgctgaagctggtgaccagaagctgcgaccccggcgagaagctggacagcaagatcggcgtgctgatcggcaagggcctgcacgagttcgacagcctgaaggaccccgaggtgaacgagttcagaagaaagatgagaaagttcagcgaggagaagatcctgagcctggtgggcctgagctggatggactggctgaagcagacctacccccccgagcacgagcccagcatccccgagaacctggaggacaagctgtacggcggcaagctgatcgtggccgtgcacttcgagaactgccaggacgtgttcagcttccaggtgagccccaacatgaaccccatcaaggtgaacgagctggccatccagaagagactgaccatccacggcaaggaggacgaggtgagcccctacgactacgtgctgcaggtgagcggcagagtggagtacgtgttcggcgaccaccccctgatccagttccagtacatcagaaactgcgtgatgaacagagccctgccccacttcatcctggtggagtgctgcaagatcaagaagatgtacgagcaggagatgatcgccatcgaggccgccatcaacagaaacagcagcaacctgcccctgcccctgccccccaagaagaccagaatcatcagccacgtgtgggagaacaacaaccccttccagatcgtgctggtgaagggcaacaagctgaacaccgaggagaccgtgaaggtgcacgtgagagccggcctgttccacggcaccgagctgctgtgcaagaccatcgtgagcagcgaggtgagcggcaagaacgaccacatctggaacgagcccctggagttcgacatcaacatctgcgacctgcccagaatggccagactgtgcttcgccgtgtacgccgtgctggacaaggtgaagaccaagaagagcaccaagaccatcaaccccagcaagtaccagaccatcagaaaggccggcaaggtgcactaccccgtggcctgggtgaacaccatggtgttcgacttcaagggccagctgagaaccggcgacatcatcctgcacagctggagcagcttccccgacgagctggaggagatgctgaaccccatgggcaccgtgcagaccaacccctacaccgagaacgccaccgccctgcacgtgaagttccccgagaacaagaagcagccctactactacccccccttcgacaagatcatcgagaaggccgccgagatcgccagcagcgacagcgccaacgtgagcagcagaggcggcaagaagttcctgcccgtgctgaaggagatcctggacagagaccccctgagccagctgtgcgagaacgagatggacctgatctggaccctgagacaggactgcagagagatcttcccccagagcctgcccaagctgctgctgagcatcaagtggaacaagctggaggacgtggcccagctgcaggccctgctgcagatctggcccaagctgccccccagagaggccctggagctgctggacttcaactaccccgaccagtacgtgagagagtacgccgtgggctgcctgagacagatgagcgacgaggagctgagccagtacctgctgcagctggtgcaggtgctgaagtacgagcccttcctggactgcgccctgagcagattcctgctggagagagccctgggcaacagaagaatcggccagttcctgttctggcacctgagaagcgaggtgcacatccccgccgtgagcgtgcagttcggcgtgatcctggaggcctactgcagaggcagcgtgggccacatgaaggtgctgagcaagcaggtggaggccctgaacaagctgaagaccctgaacagcctgatcaagctgaacgccgtgaagctgaacagagccaagggcaaggaggccatgcacacctgcctgaagcagagcgcctacagagaggccctgagcgacctgcagagccccctgaacccctgcgtgatcctgagcgagctgtacgtggagaagtgcaagtacatggacagcaagatgaagcccctgtggctggtgtacaacaacaaggtgttcggcgaggacagcgtgggcgtgatcttcaagaacggcgacgacctgagacaggacatgctgaccctgcagatgctgagactgatggacctgctgtggaaggaggccggcctggacctgagaatgctgccctacggctgcctggccaccggcgacagaagcggcctgatcgaggtggtgagcaccagcgagaccatcgccgacatccagctgaacagcagcaacgtggccgccgccgccgccttcaacaaggacgccctgctgaactggctgaaggagtacaacagcggcgacgacctggacagagccatcgaggagttcaccctgagctgcgccggctactgcgtggccagctacgtgctgggcatcggcgacagacacagcgacaacatcatggtgaagaagaccggccagctgttccacatcgacttcggccacatcctgggcaacttcaagagcaagttcggcatcaagagagagagagtgcccttcatcctgacctacgacttcatccacgtgatccagcagggcaagaccggcaacaccgagaagttcggcagattcagacagtgctgcgaggacgcctacctgatcctgagaagacacggcaacctgttcatcaccctgttcgccctgatgctgaccgccggcctgcccgagctgaccagcgtgaaggacatccagtacctgaaggacagcctggccctgggcaagagcgaggaggaggccctgaagcagttcaagcagaagttcgacgaggccctgagagagagctggaccaccaaggtgaactggatggcccacaccgtgagaaaggactacagaagctga

SEQ ID NO: 9220 - RNA, 3213 nt, synthetic construct
  misc_feature 1..3213: note = derived and/or modified sequence opt5 fromPI3K__Homo_sapiens__AAB29081
  source 1..3213: mol_type = other RNA
atgtgcttcagctttatcatgccccctgccatggctgacattctggatatctgggccgtggactcccagattgcgtctgatggcagcatcccggtcgacttcctcctgcccaccgggatttacatccaacttgaggttcctagagaagctacaatctcctatattaagcagatgctgtggaaacaggtgcacaactaccccatgtttaatctcctgatggatatcgactcttatatgttcgcctgtgtgaaccagacggccgtctacgaggaacttgaggatgaaacccggcgcctgtgcgacgtgagaccttttctccccgttctgaagctggtgacacggagctgtgatcctggagagaaactcgactccaagattggcgtcctgatcgggaaaggacttcatgagttcgattctctgaaggacccggaagtgaatgagtttcgcagaaagatgcggaaattcagcgaagagaagattctctccctggttggccttagctggatggattggctgaaacaaacctatccccctgagcacgaaccctctatccctgagaacctcgaagacaagctgtacgggggaaaactgattgtggctgtccattttgagaattgccaggacgtgttctcctttcaggtgagccccaacatgaatccgatcaaggtcaacgaactcgccatccagaagcgcctgacaattcacggcaaagaggatgaggtttctccttatgactacgtgcttcaagtgtccggcagagtcgaatacgtgttcggggatcatcccctgatccagtttcagtatattcggaattgtgttatgaaccgcgctctccctcacttcatcctggtggagtgctgtaagattaaaaagatgtacgaacaggagatgatcgccatcgaagcggccattaatagaaacagctctaatcttcccctgcccctccctccgaaaaagacccggatcatttcccacgtctgggagaacaataaccccttccaaatcgtgctggttaaaggaaacaagctgaatacagaggaaaccgtgaaggtccatgtgcgcgctggcctctttcacgggacggagctgctttgcaaaaccattgtcagctccgaagtgtctggaaagaacgaccatatctggaatgagcctctggagttcgatatcaacatttgtgacctccccagaatggcccggctgtgctttgctgtttatgccgtgcttgataaagtcaagaccaaaaagagcacaaagacaatcaatccttccaaataccagaccattcgcaaggcgggcaaagtgcactatcccgttgcctgggtgaacacgatggtcttcgactttaaggggcagctgagaacaggagatatcattctccacagctggtcttccttcccggacgaactggaggaaatgctgaatcctatgggcaccgtgcaaacaaacccctacaccgagaatgctaccgccctccatgtgaaatttcctgaaaacaagaagcagccctattactaccctcccttcgataaaatcattgagaaggctgccgagatcgccagctctgacagcgctaatgtttcctctcggggcgggaaaaagtttctgccggtccttaaagaaatcctggacagagatcctctcagccagctgtgtgagaacgaaatggacctgatttggacacttcgccaggattgccgggagatcttcccccaatccctccccaagctgctgctcagcattaagtggaataaactggaagacgtggcgcagcttcaggccctgctccagatctggcctaagctgccgcccagagaggctctggagcttctcgattttaactatcctgaccaatacgtgcgcgaatatgccgtcggatgcctgcggcagatgtctgatgaggaactgtcccagtacctcctgcagcttgtgcaagttctgaaatatgagcccttcctcgactgtgccctgagcagatttctgcttgaacgcgctctcggcaatcggagaattgggcagttcctgttctggcatctgcgctctgaggtgcacatccctgccgtctccgtgcagtttggagttatcctcgaggcgtactgccggggcagcgtggggcacatgaaggtcctgtccaaacaggtggaagctcttaacaagctgaaaacgctcaactctctgattaagctgaatgccgttaagctgaacagagccaaaggaaaggaggctatgcatacctgtctcaaacaaagcgcctatcgcgaagctctgtccgatctgcagtctcccctcaatccttgcgtgatcctgagcgagctttacgtcgaaaagtgtaaatacatggactccaagatgaagcccctgtggctcgtgtataacaataaagtgttcggcgaggatagcgtcggcgttatttttaagaacggggacgatctgcggcaggacatgctgacacttcaaatgctgagactcatggacctgctctggaaagaggccggactggatcttcggatgctgccgtacggctgcctcgcgaccggggaccgctctggactgatcgaagtggtgtccacaagcgagaccattgccgatatccagcttaattcttccaacgtcgctgccgctgccgcgttcaataaggacgcccttctgaactggctcaaagaatataatagcggcgatgacctggatagagctatcgaggagtttacgctctcttgtgccgggtactgcgtggctagctatgttctgggcattggagaccggcactccgataacatcatggtgaagaagacaggccagcttttccacattgactttgggcatatcctgggaaatttcaaaagcaagtttggcattaaaagagaacgcgtccctttcatcctcacctacgattttatccacgtgattcagcaagggaagaccggaaacacagagaaattcggccggtttagacagtgttgcgaagacgcctatctgatcctgcgcagacatgggaatcttttcattaccctgttcgccctcatgctgacagctggcctccccgagctgacgtctgttaaggatatccagtaccttaaggactccctggcgctgggaaaaagcgaagaggaggccctcaagcagtttaaacaaaagttcgacgaagctctgcgggagtcctggaccacaaaagtgaactggatggcccacaccgtccgcaaggattacagatcttga

SEQ ID NO: 9221 - protein, 1102 aa, synthetic construct
  REGION 1..1102: note = PI3K__Homo_sapiens__P48736
MELENYKQPVVLREDNCRRRRRMKPRSAAASLSSMELIPIEFVLPTSQRKCKSPETALLHVAGHGNVEQMKAQVWLRALETSVAADFYHRLGPHHFLLLYQKKGQWYEIYDKYQVVQTLDCLRYWKATHRSPGQIHLVQRHPPSEESQAFQRQLTALIGYDVTDVSNVHDDELEFTRRGLVTPRMAEVASRDPKLYAMHPWVTSKPLPEYLWKKIANNCIFIVIHRSTTSQTIKVSPDDTPGAILQSFFTKMAKKKSLMDIPESQSEQDFVLRVCGRDEYLVGETPIKNFQWVRHCLKNGEEIHVVLDTPPDPALDEVRKEEWPLVDDCTGVTGYHEQLTIHGKDHESVFTVSLWDCDRKFRVKIRGIDIPVLPRNTDLTVFVEANIQHGQQVLCQRRTSPKPFTEEVLWNVWLEFSIKIKDLPKGALLNLQIYCGKAPALSSKASAESPSSESKGKVQLLYYVNLLLIDHRFLLRRGEYVLHMWQISGKGEDQGSFNADKLTSATNPDKENSMSISILLDNYCHPIALPKHQPTPDPEGDRVRAEMPNQLRKQLEAIIATDPLNPLTAEDKELLWHFRYESLKHPKAYPKLFSSVKWGQQEIVAKTYQLLARREVWDQSALDVGLTMQLLDCNFSDENVRAIAVQKLESLEDDDVLHYLLQLVQAVKFEPYHDSALARFLLKRGLRNKRIGHFLFWFLRSEIAQSRHYQQRFAVILEAYLRGCGTAMLHDFTQQVQVIEMLQKVTLDIKSLSAEKYDVSSQVISQLKQKLENLQNSQLPESFRVPYDPGLKAGALAIEKCKVMASKKKPLWLEFKCADPTALSNETIGIIFKHGDDLRQDMLILQILRIMESIWETESLDLCLLPYGCISTGDKIGMIEIVKDATTIAKIQQSTVGNTGAFKDEVLNHWLKEKSPTEEKFQAAVERFVYSCAGYCVATFVLGIGDRHNDNIMITETGNLFHIDFGHILGNYKSFLGINKERVPFVLTPDFLFVMGTSGKKTSPHFQKFQDICVKAYLALRHHTNLLIILFSMMLMTGMPQLTSKEDIEYIRDALTVGKNEEDAKKYFLDQIEVCRDKGWTVQFNWFLHLVLGIKQGEKHSA

SEQ ID NO: 9222 - RNA, 3309 nt, synthetic construct
  misc_feature 1..3309: note = PI3K__Homo_sapiens__AAH35683
  source 1..3309: mol_type = other RNA
atggagctggagaactataaacagcccgtggtgctgagagaggacaactgccgaaggcgccggaggatgaagccgcgcagtgctgcggccagcctgtcctccatggagctcatccccatcgagttcgtgctgcccaccagccagcgcaaatgcaagagccccgaaacggcgctgctgcacgtggccggccacggcaacgtggagcagatgaaggcccaggtgtggctgcgagcgctggagaccagcgtggcggcggacttctaccaccggctgggaccgcatcacttcctcctgctctatcagaagaaggggcagtggtacgagatctacgacaagtaccaggtggtgcagactctggactgcctgcgctactggaaggccacgcaccggagcccgggccagatccacctggtgcagcggcacccgccctccgaggagtcccaagccttccagcggcagctcacggcgctgattggctatgacgtcactgacgtcagcaacgtgcacgacgatgagctggagttcacgcgccgtggcttggtgaccccgcgcatggcggaggtggccagccgcgaccccaagctctacgccatgcacccgtgggtgacgtccaagcccctcccggagtacctgtggaagaagattgccaacaactgcatcttcatcgtcattcaccgcagcaccaccagccagaccattaaggtctcacccgacgacacccccggcgccatcctgcagagcttcttcaccaagatggccaagaagaaatctctgatggatattcccgaaagccaaagcgaacaggattttgtgctgcgcgtctgtggccgggatgagtacctggtgggcgaaacgcccatcaaaaacttccagtgggtgaggcactgcctcaagaacggagaagagattcacgtggtactggacacgcctccagacccggccctagacgaggtgaggaaggaagagtggccgctggtggacgactgcacgggagtcaccggctaccatgagcagcttaccatccacggcaaggaccacgagagtgtgttcaccgtgtccctgtgggactgcgaccgcaagttcagggtcaagatcagaggcattgatatccccgtcctgcctcggaacaccgacctcacagtttttgtagaggcaaacatccagcatgggcaacaagtcctttgccaaaggagaaccagccccaaacccttcacagaggaggtgctgtggaatgtgtggcttgagttcagtatcaaaatcaaagacttgcccaaaggggctctactgaacctccagatctactgcggtaaagctccagcactgtccagcaaggcctctgcagagtcccccagttctgagtccaagggcaaagttcagcttctctattatgtgaacctgctgctgatagaccaccgtttcctcctgcgccgtggagaatacgtcctccacatgtggcagatatctgggaagggagaagaccaaggaagcttcaatgctgacaaactcacgtctgcaactaacccagacaaggagaactcaatgtccatctccattcttctggacaattactgccacccgatagccctgcctaagcatcagcccacccctgacccggaaggggaccgggttcgagcagaaatgcccaaccagcttcgcaagcaattggaggcgatcatagccactgatccacttaaccctctcacagcagaggacaaagaattgctctggcattttagatacgaaagccttaagcacccaaaagcatatcctaagctatttagttcagtgaaatggggacagcaagaaattgtggccaaaacataccaattgttggccagaagggaagtctgggatcaaagtgctttggatgttgggttaacaatgcagctcctggactgcaacttctcagatgaaaatgtaagagccattgcagttcagaaactggagagcttggaggacgatgatgttctgcattaccttctacaattggtccaggctgtgaaatttgaaccataccatgatagtgcccttgccagatttctgctgaagcgtggtttaagaaacaaaagaattggtcactttttgttttggttcttgagaagtgagatagcccagtccagacactatcagcagaggttcgctgtgattctggaagcctatctgaggggctgtggcacagccatgctgcacgactttacccaacaagtccaagtaatcgagatgttacaaaaagtcacccttgatattaaatcgctctctgctgaaaagtatgacgtcagttcccaagttatttcacaacttaaacaaaagcttgaaaacctgcagaattctcaactccccgaaagctttagagttccatatgatcctggactgaaagcaggagcgctggcaattgaaaaatgtaaagtaatggcctccaagaaaaaaccactatggcttgagtttaaatgtgccgatcctacagccctatcaaatgaaacaattggaattatctttaaacatggtgatgatctgcgccaagacatgcttattttacagattctacgaatcatggagtctatttgggagactgaatctttggatctatgcctcctgccatatggttgcatttcaactggtgacaaaataggaatgatcgagattgtgaaagacgccacgacaattgccaaaattcagcaaagcacagtgggcaacacgggagcatttaaagatgaagtcctgaatcactggctcaaagaaaaatcccctactgaagaaaagtttcaggcagcagtggagagatttgtttattcctgtgcaggctactgtgtggcaacctttgttcttggaataggcgacagacacaatgacaatattatgatcaccgagacaggaaacctatttcatattgacttcgggcacattcttgggaattacaaaagtttcctgggcattaataaagagagagtgccatttgtgctaacccctgacttcctctttgtgatgggaacttctggaaagaagacaagcccacacttccagaaatttcaggacatctgtgttaaggcttatctagcccttcgtcatcacacaaacctactgatcatcctgttctccatgatgctgatgacaggaatgccccagttaacaagcaaagaagacattgaatatatccgggatgccctcacagtggggaaaaatgaggaggatgctaaaaagtattttcttgatcagatcgaagtttgcagagacaaaggatggactgtgcagtttaattggtttctacatcttgttcttggcatcaaacaaggagagaaacattcagcctaa

SEQ ID NO: 9223 - RNA, 3309 nt, synthetic construct
  misc_feature 1..3309: note = derived and/or modified sequence opt1 fromPI3K__Homo_sapiens__AAH35683
  source 1..3309: mol_type = other RNA
atggagctggagaactacaagcagcccgtggtcctccgcgaggacaactgccggcgccggcgccggatgaagccgcgcagcgccgccgcgtccctgagctccatggagctgatccccatcgagttcgtgctccccaccagccagcggaagtgcaagtcccccgagaccgccctgctgcacgtggccggccacgggaacgtcgagcagatgaaggcccaggtgtggctccgcgccctggagacgagcgtggcggccgacttctaccaccggctgggcccgcaccacttcctcctgctgtaccagaagaaggggcagtggtacgagatctacgacaagtaccaggtcgtgcagaccctcgactgcctgcgctactggaaggccacccaccggtcccccggccagatccacctggtgcagcgccacccgcccagcgaggagtcccaggccttccagcggcagctcaccgcgctgatcgggtacgacgtcacggacgtgagcaacgtgcacgacgacgagctggagttcacccgccggggcctcgtcacgccccgcatggccgaggtggcctcccgggaccccaagctgtacgccatgcacccctgggtgaccagcaagcccctgccggagtacctctggaagaagatcgccaacaactgcatcttcatcgtcatccaccgctccaccaccagccagaccatcaaggtgtcccccgacgacacccccggcgcgatcctgcagagcttcttcacgaagatggccaagaagaagtccctgatggacatccccgagagccagtccgagcaggacttcgtgctccgggtctgcgggcgcgacgagtacctggtgggcgagaccccgatcaagaacttccagtgggtgcggcactgcctgaagaacggggaggagatccacgtcgtgctcgacaccccgcccgaccccgccctggacgaggtgcgcaaggaggagtggcccctggtcgacgactgcaccggcgtgacggggtaccacgagcagctcaccatccacggcaaggaccacgagagcgtcttcaccgtgagcctgtgggactgcgaccgcaagttccgggtgaagatccgcggcatcgacatccccgtcctgccccggaacaccgacctcacggtgttcgtggaggccaacatccagcacgggcagcaggtcctgtgccagcgccggacctcccccaagccgttcaccgaggaggtgctgtggaacgtgtggctcgagttcagcatcaagatcaaggacctgcccaagggcgccctgctcaacctgcagatctactgcgggaaggcgcccgccctgtccagcaaggcctccgccgagagcccctccagcgagtccaagggcaaggtccagctcctgtactacgtgaacctgctcctgatcgaccaccgcttcctgctccggcgcggcgagtacgtgctgcacatgtggcagatcagcgggaagggcgaggaccaggggtccttcaacgccgacaagctgaccagcgcgacgaacccggacaaggagaactccatgagcatctccatcctgctcgacaactactgccaccccatcgccctgcccaagcaccagccgacccccgaccccgagggcgaccgggtccgcgccgagatgcccaaccagctgcggaagcagctcgaggccatcatcgccaccgacccgctgaaccccctgaccgcggaggacaaggagctcctgtggcacttccgctacgagagcctgaagcaccccaaggcctaccccaagctgttctccagcgtgaagtgggggcagcaggagatcgtggccaagacgtaccagctcctggcccggcgcgaggtctgggaccagtccgcgctcgacgtgggcctgaccatgcagctgctcgactgcaacttcagcgacgagaacgtgcgggccatcgccgtccagaagctggagagcctggaggacgacgacgtgctccactacctgctgcagctcgtgcaggccgtcaagttcgagccgtaccacgactccgccctggcgcgcttcctgctcaagcggggcctgcgcaacaagcggatcgggcacttcctgttctggttcctccgcagcgagatcgcccagtcccgccactaccagcagcggttcgccgtgatcctggaggcctacctgcgcggctgcgggaccgccatgctccacgacttcacccagcaggtccaggtgatcgagatgctgcagaaggtgacgctggacatcaagagcctctccgcggagaagtacgacgtgagctcccaggtcatcagccagctgaagcagaagctggagaacctccagaactcccagctgcccgagagcttccgggtgccctacgaccccggcctgaaggccggggccctcgccatcgagaagtgcaaggtgatggcctccaagaagaagccgctgtggctggagttcaagtgcgcggaccccaccgccctcagcaacgagaccatcggcatcatcttcaagcacggcgacgacctgcgccaggacatgctgatcctccagatcctgcggatcatggagtccatctgggagaccgagagcctggacctctgcctgctgccctacgggtgcatctccacgggcgacaagatcgggatgatcgagatcgtcaaggacgccaccaccatcgccaagatccagcagagcaccgtgggcaacaccggggcgttcaaggacgaggtgctcaaccactggctgaaggagaagtcccccacggaggagaagttccaggccgccgtcgagcgcttcgtgtacagctgcgccggctactgcgtggccaccttcgtcctgggcatcggggaccggcacaacgacaacatcatgatcaccgagaccggcaacctcttccacatcgacttcgggcacatcctgggcaactacaagagcttcctgggcatcaacaaggagcgcgtgccgttcgtgctcacgcccgacttcctgttcgtcatggggacctccggcaagaagaccagcccccacttccagaagttccaggacatctgcgtgaaggcgtacctggccctccggcaccacaccaacctgctgatcatcctcttctccatgatgctgatgacggggatgccccagctgaccagcaaggaggacatcgagtacatccgcgacgccctcaccgtgggcaagaacgaggaggacgccaagaagtacttcctggaccagatcgaggtctgccgggacaaggggtggaccgtgcagttcaactggttcctgcacctcgtgctgggcatcaagcagggcgagaagcactccgcctga

SEQ ID NO: 9224 - RNA, 3309 nt, synthetic construct
  misc_feature 1..3309: note = derived and/or modified sequence opt2 fromPI3K__Homo_sapiens__AAH35683
  source 1..3309: mol_type = other RNA
atggagctcgagaactacaagcagcccgtcgtcctccgcgaggacaactgccgccgccgccgccgcatgaagccccgctccgccgccgcctccctctcctccatggagctcatccccatcgagttcgtcctccccacctcccagcgcaagtgcaagtcccccgagaccgccctcctccacgtcgccggccacggcaacgtcgagcagatgaaggcccaggtctggctccgcgccctcgagacctccgtcgccgccgacttctaccaccgcctcggcccccaccacttcctcctcctctaccagaagaagggccagtggtacgagatctacgacaagtaccaggtcgtccagaccctcgactgcctccgctactggaaggccacccaccgctcccccggccagatccacctcgtccagcgccaccccccctccgaggagtcccaggccttccagcgccagctcaccgccctcatcggctacgacgtcaccgacgtctccaacgtccacgacgacgagctcgagttcacccgccgcggcctcgtcaccccccgcatggccgaggtcgcctcccgcgaccccaagctctacgccatgcacccctgggtcacctccaagcccctccccgagtacctctggaagaagatcgccaacaactgcatcttcatcgtcatccaccgctccaccacctcccagaccatcaaggtctcccccgacgacacccccggcgccatcctccagtccttcttcaccaagatggccaagaagaagtccctcatggacatccccgagtcccagtccgagcaggacttcgtcctccgcgtctgcggccgcgacgagtacctcgtcggcgagacccccatcaagaacttccagtgggtccgccactgcctcaagaacggcgaggagatccacgtcgtcctcgacaccccccccgaccccgccctcgacgaggtccgcaaggaggagtggcccctcgtcgacgactgcaccggcgtcaccggctaccacgagcagctcaccatccacggcaaggaccacgagtccgtcttcaccgtctccctctgggactgcgaccgcaagttccgcgtcaagatccgcggcatcgacatccccgtcctcccccgcaacaccgacctcaccgtcttcgtcgaggccaacatccagcacggccagcaggtcctctgccagcgccgcacctcccccaagcccttcaccgaggaggtcctctggaacgtctggctcgagttctccatcaagatcaaggacctccccaagggcgccctcctcaacctccagatctactgcggcaaggcccccgccctctcctccaaggcctccgccgagtccccctcctccgagtccaagggcaaggtccagctcctctactacgtcaacctcctcctcatcgaccaccgcttcctcctccgccgcggcgagtacgtcctccacatgtggcagatctccggcaagggcgaggaccagggctccttcaacgccgacaagctcacctccgccaccaaccccgacaaggagaactccatgtccatctccatcctcctcgacaactactgccaccccatcgccctccccaagcaccagcccacccccgaccccgagggcgaccgcgtccgcgccgagatgcccaaccagctccgcaagcagctcgaggccatcatcgccaccgaccccctcaaccccctcaccgccgaggacaaggagctcctctggcacttccgctacgagtccctcaagcaccccaaggcctaccccaagctcttctcctccgtcaagtggggccagcaggagatcgtcgccaagacctaccagctcctcgcccgccgcgaggtctgggaccagtccgccctcgacgtcggcctcaccatgcagctcctcgactgcaacttctccgacgagaacgtccgcgccatcgccgtccagaagctcgagtccctcgaggacgacgacgtcctccactacctcctccagctcgtccaggccgtcaagttcgagccctaccacgactccgccctcgcccgcttcctcctcaagcgcggcctccgcaacaagcgcatcggccacttcctcttctggttcctccgctccgagatcgcccagtcccgccactaccagcagcgcttcgccgtcatcctcgaggcctacctccgcggctgcggcaccgccatgctccacgacttcacccagcaggtccaggtcatcgagatgctccagaaggtcaccctcgacatcaagtccctctccgccgagaagtacgacgtctcctcccaggtcatctcccagctcaagcagaagctcgagaacctccagaactcccagctccccgagtccttccgcgtcccctacgaccccggcctcaaggccggcgccctcgccatcgagaagtgcaaggtcatggcctccaagaagaagcccctctggctcgagttcaagtgcgccgaccccaccgccctctccaacgagaccatcggcatcatcttcaagcacggcgacgacctccgccaggacatgctcatcctccagatcctccgcatcatggagtccatctgggagaccgagtccctcgacctctgcctcctcccctacggctgcatctccaccggcgacaagatcggcatgatcgagatcgtcaaggacgccaccaccatcgccaagatccagcagtccaccgtcggcaacaccggcgccttcaaggacgaggtcctcaaccactggctcaaggagaagtcccccaccgaggagaagttccaggccgccgtcgagcgcttcgtctactcctgcgccggctactgcgtcgccaccttcgtcctcggcatcggcgaccgccacaacgacaacatcatgatcaccgagaccggcaacctcttccacatcgacttcggccacatcctcggcaactacaagtccttcctcggcatcaacaaggagcgcgtccccttcgtcctcacccccgacttcctcttcgtcatgggcacctccggcaagaagacctccccccacttccagaagttccaggacatctgcgtcaaggcctacctcgccctccgccaccacaccaacctcctcatcatcctcttctccatgatgctcatgaccggcatgccccagctcacctccaaggaggacatcgagtacatccgcgacgccctcaccgtcggcaagaacgaggaggacgccaagaagtacttcctcgaccagatcgaggtctgccgcgacaagggctggaccgtccagttcaactggttcctccacctcgtcctcggcatcaagcagggcgagaagcactccgcctga

SEQ ID NO: 9225 - RNA, 3309 nt, synthetic construct
  misc_feature 1..3309: note = derived and/or modified sequence opt3 fromPI3K__Homo_sapiens__AAH35683
  source 1..3309: mol_type = other RNA
atggagctggaaaactacaagcagcccgtggtcctcagagaggacaattgcaggcggcgccgacgtatgaaacctagaagcgccgctgcatccctttcttcaatggaactgatcccaattgagttcgttttgccgaccagtcaaaggaagtgtaaaagccccgaaacagccttactgcacgtggcgggccatgggaacgtagagcagatgaaggctcaggtgtggctacgggccctcgagacttccgtcgcagccgatttttatcaccgcctgggacctcatcacttccttctgttgtaccagaaaaagggtcaatggtatgaaatatacgacaagtatcaggtggttcagacgctcgattgcctgagatactggaaagctacccataggtctccaggccagatccacctggtgcaacggcatcccccttcggaggaatcacaggcatttcagcgccagctcacagccttaattgggtatgacgtcactgatgtgagcaatgtacacgacgatgagctggagttcacccgaagaggacttgttacaccaaggatggctgaagtggccagtcgggaccccaagttgtacgcgatgcacccttgggtcacctccaaaccactgccggagtacctatggaagaaaatcgcaaacaattgtatttttatcgtgatacatcgttctactacaagccaaaccatcaaggtgtcccccgatgacacgcctggcgccattctccagtcattctttactaagatggctaaaaagaaaagtctgatggatatcccagaaagccagtctgagcaagacttcgtccttcgcgtttgcggtagagatgaatatctggtgggggagacccccattaagaactttcagtgggtaaggcactgtttgaaaaatggagaggaaatccacgtggtcctcgacacacctccagaccccgccctggatgaggtgcggaaggaagagtggccgttagttgacgattgcactggcgtgaccggctaccatgaacagctgacaatacacgggaaagaccatgagtccgtcttcaccgtgtcactctgggattgtgaccgaaagtttcgcgtaaagattagaggaatcgatattcctgttcttcccaggaacacggacctgactgtgttcgtcgaggcaaatatccagcacggtcaacaggtgttgtgccagcggcgcacaagcccaaaaccttttaccgaagaggtcctatggaacgtgtggctggagttcagtatcaagattaaagatctccccaagggcgctctgcttaatctgcagatatattgtgggaaagccccagcgttgtcttccaaggccagcgcagaatcgccctcttccgaatcaaagggaaaagttcaactcctgtactatgtgaacttactgctaatcgaccatagattcctcctgaggcgtggcgagtacgtacttcacatgtggcagattagtggtaagggggaggatcagggcagctttaatgctgacaaattgacttccgccacaaaccctgacaaggaaaattctatgagcatctcaatactgctcgataactattgccacccaattgctctgccgaaacatcagcccacccctgacccagagggagatcgggtccgagccgaaatgcccaaccaacttagaaagcagctggaggcaatcatcgccacggaccctttgaatccactcaccgctgaggataaggaactgttatggcacttcaggtacgagagtctgaaacatcccaaggcgtacccgaaactattttccagcgtgaagtggggccagcaggaaattgttgcaaaaacatatcaactcctggcccgccgggaggtgtgggaccagtctgctcttgatgtcgggttgactatgcagctgctcgactgtaacttctcagatgaaaatgtgagagccatcgcagtacaaaagctggagagtttagaggacgatgacgtgctgcactaccttttgcagctcgttcaggccgtcaagtttgaaccttatcacgatagcgctctggccaggttcctactgaaacgcggactccgaaacaagcggattggtcattttctgttctggtttcttcgttccgagatagcacagtctagacactaccaacagaggttcgcggtgatcttggaggcttatctgcgcggctgcgggaccgccatgttacatgactttacacaacaggtgcaggtcattgaaatgctccagaaagttactctggacatcaagtcgcttagcgcagaaaaatacgatgtgtcctcacaggtgatcagtcagctgaagcaaaaattggagaatctccagaactctcagctgccagagagcttccgggtaccctatgaccctggactaaaggccggcgctctggccattgaaaagtgcaaagtcatggcatccaagaaaaagcccctctggctggagtttaaatgtgctgatccaaccgccctttcaaatgaaacaataggtatcattttcaagcacggggacgatttgagacaagacatgctgatcttacagattctcaggatcatggagagcatatgggaaaccgagtctctggatctttgcctgctaccttacggctgtatctccactggagacaagattggcatgatcgagattgtgaaagatgcgacgacaatcgccaagatacagcagagtaccgttgggaacactggagctttcaaagacgaagtgctcaatcattggctgaaggagaaaagccccaccgaagagaagtttcaagcagccgtcgagcgattcgtgtactcttgcgctggttattgtgttgccacatttgtgttgggcattggggatcgccacaacgacaatatcatgattaccgaaactggaaacctgttccacatcgattttggccatatattaggtaattacaagtccttcctcgggatcaacaaagagcgggtaccatttgtcctgacaccggacttcctttttgtgatgggcacgtcaggaaagaaaaccagtcctcacttccagaagtttcaggacatttgcgtgaaagcatatctggcgttgagacatcacactaatctcctgatcattctattcagcatgatgctgatgacaggcatgccccagcttacctcgaaggaagatatcgagtacataagggacgccctcacagtcgggaagaacgaagaggatgctaaaaagtattttctggaccaaattgaggtttgtcgtgataaaggatggactgtgcagttcaactggttcttgcatctggtattaggtatcaagcagggcgaaaaacactccgcctga

SEQ ID NO: 9226 - RNA, 3309 nt, synthetic construct
  misc_feature 1..3309: note = derived and/or modified sequence opt4 fromPI3K__Homo_sapiens__AAH35683
  source 1..3309: mol_type = other RNA
atggagctggagaactacaagcagcccgtggtgctgagagaggacaactgcagaagaagaagaagaatgaagcccagaagcgccgccgccagcctgagcagcatggagctgatccccatcgagttcgtgctgcccaccagccagagaaagtgcaagagccccgagaccgccctgctgcacgtggccggccacggcaacgtggagcagatgaaggcccaggtgtggctgagagccctggagaccagcgtggccgccgacttctaccacagactgggcccccaccacttcctgctgctgtaccagaagaagggccagtggtacgagatctacgacaagtaccaggtggtgcagaccctggactgcctgagatactggaaggccacccacagaagccccggccagatccacctggtgcagagacacccccccagcgaggagagccaggccttccagagacagctgaccgccctgatcggctacgacgtgaccgacgtgagcaacgtgcacgacgacgagctggagttcaccagaagaggcctggtgacccccagaatggccgaggtggccagcagagaccccaagctgtacgccatgcacccctgggtgaccagcaagcccctgcccgagtacctgtggaagaagatcgccaacaactgcatcttcatcgtgatccacagaagcaccaccagccagaccatcaaggtgagccccgacgacacccccggcgccatcctgcagagcttcttcaccaagatggccaagaagaagagcctgatggacatccccgagagccagagcgagcaggacttcgtgctgagagtgtgcggcagagacgagtacctggtgggcgagacccccatcaagaacttccagtgggtgagacactgcctgaagaacggcgaggagatccacgtggtgctggacaccccccccgaccccgccctggacgaggtgagaaaggaggagtggcccctggtggacgactgcaccggcgtgaccggctaccacgagcagctgaccatccacggcaaggaccacgagagcgtgttcaccgtgagcctgtgggactgcgacagaaagttcagagtgaagatcagaggcatcgacatccccgtgctgcccagaaacaccgacctgaccgtgttcgtggaggccaacatccagcacggccagcaggtgctgtgccagagaagaaccagccccaagcccttcaccgaggaggtgctgtggaacgtgtggctggagttcagcatcaagatcaaggacctgcccaagggcgccctgctgaacctgcagatctactgcggcaaggcccccgccctgagcagcaaggccagcgccgagagccccagcagcgagagcaagggcaaggtgcagctgctgtactacgtgaacctgctgctgatcgaccacagattcctgctgagaagaggcgagtacgtgctgcacatgtggcagatcagcggcaagggcgaggaccagggcagcttcaacgccgacaagctgaccagcgccaccaaccccgacaaggagaacagcatgagcatcagcatcctgctggacaactactgccaccccatcgccctgcccaagcaccagcccacccccgaccccgagggcgacagagtgagagccgagatgcccaaccagctgagaaagcagctggaggccatcatcgccaccgaccccctgaaccccctgaccgccgaggacaaggagctgctgtggcacttcagatacgagagcctgaagcaccccaaggcctaccccaagctgttcagcagcgtgaagtggggccagcaggagatcgtggccaagacctaccagctgctggccagaagagaggtgtgggaccagagcgccctggacgtgggcctgaccatgcagctgctggactgcaacttcagcgacgagaacgtgagagccatcgccgtgcagaagctggagagcctggaggacgacgacgtgctgcactacctgctgcagctggtgcaggccgtgaagttcgagccctaccacgacagcgccctggccagattcctgctgaagagaggcctgagaaacaagagaatcggccacttcctgttctggttcctgagaagcgagatcgcccagagcagacactaccagcagagattcgccgtgatcctggaggcctacctgagaggctgcggcaccgccatgctgcacgacttcacccagcaggtgcaggtgatcgagatgctgcagaaggtgaccctggacatcaagagcctgagcgccgagaagtacgacgtgagcagccaggtgatcagccagctgaagcagaagctggagaacctgcagaacagccagctgcccgagagcttcagagtgccctacgaccccggcctgaaggccggcgccctggccatcgagaagtgcaaggtgatggccagcaagaagaagcccctgtggctggagttcaagtgcgccgaccccaccgccctgagcaacgagaccatcggcatcatcttcaagcacggcgacgacctgagacaggacatgctgatcctgcagatcctgagaatcatggagagcatctgggagaccgagagcctggacctgtgcctgctgccctacggctgcatcagcaccggcgacaagatcggcatgatcgagatcgtgaaggacgccaccaccatcgccaagatccagcagagcaccgtgggcaacaccggcgccttcaaggacgaggtgctgaaccactggctgaaggagaagagccccaccgaggagaagttccaggccgccgtggagagattcgtgtacagctgcgccggctactgcgtggccaccttcgtgctgggcatcggcgacagacacaacgacaacatcatgatcaccgagaccggcaacctgttccacatcgacttcggccacatcctgggcaactacaagagcttcctgggcatcaacaaggagagagtgcccttcgtgctgacccccgacttcctgttcgtgatgggcaccagcggcaagaagaccagcccccacttccagaagttccaggacatctgcgtgaaggcctacctggccctgagacaccacaccaacctgctgatcatcctgttcagcatgatgctgatgaccggcatgccccagctgaccagcaaggaggacatcgagtacatcagagacgccctgaccgtgggcaagaacgaggaggacgccaagaagtacttcctggaccagatcgaggtgtgcagagacaagggctggaccgtgcagttcaactggttcctgcacctggtgctgggcatcaagcagggcgagaagcacagcgcctga

SEQ ID NO: 9227 - RNA, 3309 nt, synthetic construct
  misc_feature 1..3309: note = derived and/or modified sequence opt5 fromPI3K__Homo_sapiens__AAH35683
  source 1..3309: mol_type = other RNA
atggagctggaaaactacaagcagcccgtggtcctcagagaggacaattgccggcgcagacggcgcatgaaacctagaagcgccgctgcctccctgtctagcatggaacttatcccgattgagttcgttctgcccacctcccaacggaagtgtaaatctcctgaaacagcgctcctgcacgtggctggccatgggaacgtggagcagatgaaggcccaggtctggcttcgcgccctggagacgagcgtggctgccgatttttatcacagactcggaccccatcacttcctgctgctctaccagaaaaagggccaatggtatgaaatctacgacaagtatcaggttgtgcagaccctggattgccttcggtactggaaagctacacatcgctcccctgggcagattcacctggtccaaagacatcccccttctgaggaaagccaggcctttcagcggcagctcaccgcgctgatcggatatgacgtgacagatgtttccaatgtgcacgacgatgagcttgagttcacccgcagaggcctggtcacaccgcggatggccgaagtggctagccgcgaccccaagctctacgccatgcacccttgggtgacctctaaacccctgcctgagtacctgtggaagaaaattgctaacaattgtatctttatcgtcattcatagatccacgaccagccaaacaatcaaggtttctcccgatgacaccccgggggccattctccagtccttctttacaaagatggcgaaaaagaaaagcctgatggatatccctgaatctcagtccgagcaagacttcgtgcttcgggtgtgcggaagagatgaatatctggtcggcgagacccccattaagaactttcagtgggtgcgccactgtctcaaaaatggcgaggaaatccacgttgtgctggacacgcctcccgaccccgcccttgatgaggtccggaaggaagagtggcctctggtggacgattgcacaggggttaccggataccatgaacagctcacaattcacggcaaagaccatgagagcgtgttcaccgtctccctgtgggattgtgacagaaagtttcgcgtgaagatccgggggatcgatattccggtcctgcccagaaacaccgacctcacagtgttcgttgaggctaatatccagcacggacaacaggtgctgtgccagcgccggacgtctcctaaaccctttaccgaagaggtcctttggaacgtgtggctggagttcagcattaagatcaaagatctccctaagggcgccctgcttaatctgcagatttattgtgggaaagctcccgccctctccagcaaggcctctgctgaatccccgagctctgaaagcaagggaaaagttcaactgctgtactatgtgaacctcctgcttatcgaccatagattcctgctccgccggggcgagtacgtcctgcacatgtggcagatctccggcaagggggaggatcagggatcttttaatgcggacaaactgacaagcgccaccaaccctgacaaggaaaattccatgagcatttctatccttctcgataactattgccaccccattgctctgcctaaacatcagcccacacctgaccccgagggcgatagagtgcgcgccgaaatgccgaaccaactgcggaagcagctcgaggccatcattgctaccgaccctctgaatccccttacggccgaggataaggaactgctctggcacttcagatacgagtccctgaaacatcccaaggcgtaccctaaactgtttagctctgtgaagtgggggcagcaggaaatcgttgctaaaacatatcaacttctcgcccggcgcgaggtctgggaccagtccgccctggatgtgggactgaccatgcagctcctggactgtaacttcagcgatgaaaatgtgagagctatcgccgtccaaaaacttgagtccctggaggacgatgacgtgctccactacctgctgcagcttgttcaggctgtgaagtttgaaccgtatcacgattctgccctcgcgcggttcctgctgaaaagaggcctccgcaacaagcggattgggcattttctgttctggtttcttagaagcgagatcgcccagtcccgccactaccaacagagattcgctgtcattctggaagcctatctccggggatgcggcaccgctatgctgcatgactttacacaacaggtgcaggttatcgagatgctgcagaaagtgacccttgacattaagtctctcagcgccgaaaaatacgatgtctccagccaggtgatctctcagctgaagcaaaaactggagaatctccagaactcccagctgcccgagagcttccgcgttccttatgaccccggccttaaggcgggggccctggctattgaaaagtgcaaagtgatggcctctaagaaaaagcctctctggctggagtttaaatgtgctgatcccacagccctgtccaatgaaacgatcggaatcattttcaagcacggcgacgatcttagacaagacatgctgatcctccagattctgcggatcatggagagcatttgggaaaccgagtctctcgatctgtgccttctgccttacgggtgtatcagcacaggagacaagatcggcatgattgagatcgtcaaagatgccaccacaattgctaagatccagcagtccaccgtggggaacacgggcgcgttcaaagacgaagtgctcaatcattggctgaaggagaaaagccccaccgaagagaagtttcaagccgctgtcgagcgcttcgtttactcttgcgccggatattgtgtggccacatttgtgctgggcattggggatagacacaacgacaatatcatgatcaccgaaacaggaaaccttttccacattgattttggccatatcctggggaattacaagtccttcctcggaattaacaaagagcgggtcccgtttgtgctgacccctgacttcctctttgttatgggcacgagcgggaagaaaacatctccccacttccagaagtttcaggacatctgcgtgaaggcttatctggcccttcgccatcacaccaatctgctcattatcctgttctccatgatgctgatgacaggcatgcctcagcttaccagcaaggaagatatcgagtacattagagacgcgctgaccgtcggaaagaacgaagaggatgctaaaaagtattttctcgaccaaatcgaggtgtgtcgggataaaggctggacagttcagttcaactggttcctgcatctcgtgctggggattaagcagggagaaaaacactccgcctga

SEQ ID NO: 9228 - protein, 754 aa, synthetic construct
  REGION 1..754: note = PI3K__Homo_sapiens__Q5UE93
MESSDVELDLQRSVQAVLRELSTQAPALQSNQGMWRWSLHKKVERDPGKSPVLVRILLRELEKAESQDLRHVIIPLLHTVMYVLTKATGITEELYQRIYAFCTRLLTLPTPYCTVALDCAIRLKTEMAVPGTLYQRMVIAEQNLTNELYPYQERVFLFVDPELVSASVCSALLLEIEAAQAQQTPETCMRHVVSHALQAALGEACHAGALHRKLQASPRRTLEHYFHAVVAALEQMASEASPSREGHVERLEEIYCSLLGPAAGRCGGDLVQERPPSIPLPSPYITFHLWTGEEQLWKELVLFLRPRSQLRLSADLEVLDLQGLRPDRELARVSVLSTDSGIERDLPTGADELPAPGSPEMERAGLQRKGGIKKRAWPLDFLMPGSWDGPPGLHRRTGRPSGDGEMLPGVSRLHTARVLVLGDDRMLGRLAQAYHRLRKRETQKFCLTPRLSLQLYYIPVLAPEKPAASRQPELGELATFLGRVDPWYQSNVNTLCPAIHKLAEMPPSLDTSRTVDPFILDVITYYIRMGTQPIYFQIYTVKIFFSDLSQDPTEDIFLIELKVKIQDSKFPKDGFSPRRRGVAEGPGAELSLCYQKALLSHRPREVTVSLRATGLILKAIPASDTEVSGSSHCPLPAAPVTDHTCLNVNVTEVVKSSNLAGKSFSTVTNTFRTNNIQIQSRDQRLLTLSLDKDDQRTFRDVVRFEVAPCPEPCSGAQKSKAPWLNLHGQQEVEAIKAKPKPLLMPINTFSGIVQ

SEQ ID NO: 9229 - RNA, 2265 nt, synthetic construct
  misc_feature 1..2265: note = PI3K__Homo_sapiens__AAV30085
  source 1..2265: mol_type = other RNA
atggagagctcagatgtggagctggacctccagaggagcgtgcaggctgtgctccgggagctcagcacccaggcccctgccctgcagagcaaccaaggcatgtggaggtggtccctgcacaagaaggtcgagcgagatcccggtaagagcccagtgctggtccgcattcttctcagagaactggagaaggcggaaagccaggacctccggcatgtcatcattcccttgctgcacactgtaatgtacgtgctcaccaaggccacaggaatcacagaagagctctaccagagaatctatgccttttgcacaaggttactgaccctgcccaccccctactgcacagtcgccttggactgcgcgataaggctgaaaacggagatggctgtcccagggacactgtaccaaaggatggtcattgccgaacagaacttgacgaatgagctgtatccctaccaggagagagtgttcctcttcgtggatcctgagctggtgtctgcgtctgtgtgcagtgctctgctactggagatcgaggcggcccaggcgcagcagacaccagagacctgcatgcgccacgtggtctcccacgccctgcaggcggctctgggggaggcctgtcacgcaggcgctctgcacaggaagctgcaggccagccctcgccgcaccctggagcactatttccacgccgtggtggccgccttggagcagatggccagcgaggccagcccgagccgggagggacacgtagagaggctggaggagatttactgctcgctgctgggtcccgcggcggggcgctgcggtggtgaccttgtccaagagcggccaccaagcattcccctgcccagcccctacatcaccttccacttgtggaccggtgaggagcagctctggaaggaactggtgctcttcctccgcccaagatcccagctgcgcctcagtgctgacttggaggtcttggatctgcagggcctccggccggaccgggagttggcccgggtttctgtgctgtccactgacagcggcattgagcgggaccttcccacgggggctgatgagctgcctgcacccggcagccctgagatggagcgagccgggctgcagcgcaaagggggcatcaagaagcgtgcatggcccctggacttcttgatgcctggcagctgggacgggcccccagggctgcaccggaggacaggccggcccagtggggatggggaaatgctgcccggcgtgtcccggctgcacacagcccgggtacttgtgctcggagatgacaggatgctggggcgcctggcccaggcctaccacagactcaggaaacgggagacccagaagttctgcctcactcccagactcagcctgcagctctactacatccccgtgctggcgcctgagaagcctgcagcatccaggcagccggagctgggagagctggctacgttcctgggccgcgtagacccgtggtaccagagcaacgtcaacacgctgtgccccgccatccacaagctggctgagatgcctccttccctggacacatcccggactgtggaccccttcatcctagacgtcatcacctactacatccgcatgggcacccaacccatctatttccagatctacacagtcaagatctttttcagtgacctgagccaagaccctactgaggacattttcctcattgaactgaaggtgaagatccaagattctaaattccccaaagatggcttttcacccaggaggagaggcgtggctgagggcccaggggcagagctctccctatgctaccagaaggccttgcttagccaccggccccgagaggtcaccgtttccctgcgggccactgggctgatcctgaaggccattccagccagcgacacagaagtttcagggtctagccattgccccctgcctgctgctcctgtcacagaccacacatgtctgaatgtcaacgtgacagaggttgtcaagtcctccaacttggcgggaaagtccttctctacagtgaccaacaccttcaggacgaacaatatccagatccagagccgggaccagaggctgctgacactgtcgctggacaaggacgatcaacgcactttcagggatgtggtcagattcgaggttgctccctgcccagaaccatgttctggggcccagaagtccaaggcaccgtggctcaatttgcatgggcaacaggaggtggaagcaatcaaagccaagcccaagccccttctgatgcccatcaacacattctctggtattgtccagtga

SEQ ID NO: 9230 - RNA, 2265 nt, synthetic construct
  misc_feature 1..2265: note = derived and/or modified sequence opt1 fromPI3K__Homo_sapiens__AAV30085
  source 1..2265: mol_type = other RNA
atggagagctccgacgtggagctggacctccagcgcagcgtccaggccgtgctgcgggagctgtccacccaggcccccgcgctccagagcaaccagggcatgtggcgctggtccctgcacaagaaggtggagcgggacccggggaagtcccccgtcctggtgcgcatcctcctgcgggagctggagaaggccgagtcccaggacctccgccacgtgatcatccccctgctgcacaccgtcatgtacgtgctcacgaaggccaccggcatcaccgaggagctgtaccagcggatctacgccttctgcacccgcctgctcacgctgcccaccccgtactgcaccgtggccctggactgcgcgatccggctcaagaccgagatggccgtccccgggacgctgtaccagcgcatggtgatcgccgagcagaacctgaccaacgagctctacccctaccaggagcgggtgttcctgttcgtcgaccccgagctggtgagcgcctccgtgtgcagcgcgctcctgctggagatcgaggccgcccaggcccagcagaccccggagacctgcatgcgccacgtcgtgtcccacgccctccaggcggccctgggcgaggcctgccacgccggggccctgcaccggaagctccaggcgagcccccgccggacgctggagcactacttccacgccgtggtcgccgccctggagcagatggcctccgaggcgagcccctcccgcgagggccacgtggagcggctcgaggagatctactgcagcctgctgggccccgccgccgggcgctgcggcggggacctcgtgcaggagcggccgccctccatccccctgcccagcccgtacatcaccttccacctgtggaccggcgaggagcagctctggaaggagctggtcctgttcctccgcccccggtcccagctgcgcctgagcgccgacctcgaggtgctggacctgcaggggctccgccccgaccgggagctggcccgcgtgagcgtcctgtccaccgacagcggcatcgagcgggacctgcccacgggcgcggacgagctcccggcccccgggtcccccgagatggagcgcgccggcctgcagcggaagggcgggatcaagaagcgcgcctggcccctggacttcctcatgccgggcagctgggacgggccgcccggcctgcaccggcgcaccgggcggccctccggcgacggggagatgctgcccggcgtgagccgcctccacaccgcgcgggtcctggtgctgggcgacgaccgcatgctcgggcggctggcccaggcctaccaccgcctgcggaagcgcgagacccagaagttctgcctcacgccccggctgtccctgcagctctactacatccccgtgctggccccggagaagcccgccgcgagccgccagcccgagctgggcgagctcgccaccttcctggggcgggtcgacccctggtaccagtccaacgtgaacaccctgtgcccggccatccacaagctcgccgagatgccgcccagcctggacacctcccgcacggtggaccccttcatcctggacgtcatcacctactacatccgcatgggcacccagcccatctacttccagatctacaccgtgaagatcttcttcagcgacctctcccaggaccccacggaggacatcttcctgatcgagctgaaggtgaagatccaggacagcaagttccccaaggacgggttcagcccccggcgccggggcgtcgccgagggcccgggggcggagctcagcctgtgctaccagaaggccctgctctcccaccgcccccgggaggtgaccgtgagcctgcgcgccaccggcctgatcctcaaggccatccccgcctccgacaccgaggtcagcgggagctcccactgccccctgccggcggcccccgtgacggaccacacgtgcctgaacgtgaacgtcaccgaggtggtcaagagctccaacctcgccggcaagagcttctccaccgtgaccaacaccttccggaccaacaacatccagatccagagccgcgaccagcggctgctgaccctctccctggacaaggacgaccagcgcaccttccgggacgtggtgcgcttcgaggtcgccccctgccccgagccgtgcagcggggcgcagaagtccaaggccccctggctgaacctccacggccagcaggaggtggaggccatcaaggccaagcccaagcccctgctgatgccgatcaacacgttcagcggcatcgtgcagtga

SEQ ID NO: 9231 - RNA, 2265 nt, synthetic construct
  misc_feature 1..2265: note = derived and/or modified sequence opt2 fromPI3K__Homo_sapiens__AAV30085
  source 1..2265: mol_type = other RNA
atggagtcctccgacgtcgagctcgacctccagcgctccgtccaggccgtcctccgcgagctctccacccaggcccccgccctccagtccaaccagggcatgtggcgctggtccctccacaagaaggtcgagcgcgaccccggcaagtcccccgtcctcgtccgcatcctcctccgcgagctcgagaaggccgagtcccaggacctccgccacgtcatcatccccctcctccacaccgtcatgtacgtcctcaccaaggccaccggcatcaccgaggagctctaccagcgcatctacgccttctgcacccgcctcctcaccctccccaccccctactgcaccgtcgccctcgactgcgccatccgcctcaagaccgagatggccgtccccggcaccctctaccagcgcatggtcatcgccgagcagaacctcaccaacgagctctacccctaccaggagcgcgtcttcctcttcgtcgaccccgagctcgtctccgcctccgtctgctccgccctcctcctcgagatcgaggccgcccaggcccagcagacccccgagacctgcatgcgccacgtcgtctcccacgccctccaggccgccctcggcgaggcctgccacgccggcgccctccaccgcaagctccaggcctccccccgccgcaccctcgagcactacttccacgccgtcgtcgccgccctcgagcagatggcctccgaggcctccccctcccgcgagggccacgtcgagcgcctcgaggagatctactgctccctcctcggccccgccgccggccgctgcggcggcgacctcgtccaggagcgccccccctccatccccctcccctccccctacatcaccttccacctctggaccggcgaggagcagctctggaaggagctcgtcctcttcctccgcccccgctcccagctccgcctctccgccgacctcgaggtcctcgacctccagggcctccgccccgaccgcgagctcgcccgcgtctccgtcctctccaccgactccggcatcgagcgcgacctccccaccggcgccgacgagctccccgcccccggctcccccgagatggagcgcgccggcctccagcgcaagggcggcatcaagaagcgcgcctggcccctcgacttcctcatgcccggctcctgggacggcccccccggcctccaccgccgcaccggccgcccctccggcgacggcgagatgctccccggcgtctcccgcctccacaccgcccgcgtcctcgtcctcggcgacgaccgcatgctcggccgcctcgcccaggcctaccaccgcctccgcaagcgcgagacccagaagttctgcctcaccccccgcctctccctccagctctactacatccccgtcctcgcccccgagaagcccgccgcctcccgccagcccgagctcggcgagctcgccaccttcctcggccgcgtcgacccctggtaccagtccaacgtcaacaccctctgccccgccatccacaagctcgccgagatgcccccctccctcgacacctcccgcaccgtcgaccccttcatcctcgacgtcatcacctactacatccgcatgggcacccagcccatctacttccagatctacaccgtcaagatcttcttctccgacctctcccaggaccccaccgaggacatcttcctcatcgagctcaaggtcaagatccaggactccaagttccccaaggacggcttctccccccgccgccgcggcgtcgccgagggccccggcgccgagctctccctctgctaccagaaggccctcctctcccaccgcccccgcgaggtcaccgtctccctccgcgccaccggcctcatcctcaaggccatccccgcctccgacaccgaggtctccggctcctcccactgccccctccccgccgcccccgtcaccgaccacacctgcctcaacgtcaacgtcaccgaggtcgtcaagtcctccaacctcgccggcaagtccttctccaccgtcaccaacaccttccgcaccaacaacatccagatccagtcccgcgaccagcgcctcctcaccctctccctcgacaaggacgaccagcgcaccttccgcgacgtcgtccgcttcgaggtcgccccctgccccgagccctgctccggcgcccagaagtccaaggccccctggctcaacctccacggccagcaggaggtcgaggccatcaaggccaagcccaagcccctcctcatgcccatcaacaccttctccggcatcgtccagtga

SEQ ID NO: 9232 - RNA, 2265 nt, synthetic construct
  misc_feature 1..2265: note = derived and/or modified sequence opt3 fromPI3K__Homo_sapiens__AAV30085
  source 1..2265: mol_type = other RNA
atggagagctccgacgtggaactggatctccagagatctgtccaagccgttcttagggagctgtcaacccaggctcccgcattgcagagtaaccagggcatgtggcggtggagcttacacaagaaagtggaacgcgaccctgggaagtccccagtactggtgcgaatcctactccgtgagctggaaaaagccgagtctcaagatcttagacatgtcattataccgctgttgcacacagtgatgtacgttctcactaaggcgacgggaatcaccgaggaactgtatcagaggatttacgctttctgcacacggctgctcactttacccaccccttattgtacagtggccctggactgcgcaatccgccttaaaaccgagatggccgtcccaggtactttgtaccagagaatggtgattgctgaacagaatctgacaaacgagctatatccctaccaagagagggtatttctcttcgttgatcctgaactggtgtcggcatcagtctgtagcgcccttctgttggagatcgaagctgcccaggcgcagcagaccccagagacgtgcatgcggcatgtggtgagtcacgcactccaagccgctctgggcgaagcctgtcatgcaggggctttacaccgcaagctgcaggcctctccccgaagaactctcgagcactattttcatgcggtcgttgccgcacttgagcagatggcttccgaagccagcccttccagggagggacacgtggaacggctggaggaaatatactgctcattgctaggcccagctgccggtcgttgtgggggagacctggtacaagagcgcccgcccagtatccctctcccaagcccctacattaccttccatctgtggacaggcgaggaacagctttggaaggagctggtgttgtttctcagacctaggtctcagctgcggttatccgcagatctggaagtcctagacctccagggcctgcgaccagatcgcgagcttgccagagtgtcagttttgagcactgacagtgggatcgaaagggatctgcccaccggagctgacgagctcccggcgcctggttctcccgagatggaacgggcaggcctgcaacgcaaagggggaattaagaaaagagcctggccacttgatttcctgatgcctggctcctgggacggtcccccagggttgcacaggcgtacaggacggcccagcggcgacggcgagatgctccctggggtgtcgcgactgcacaccgctagagtcttagtgctgggagatgacaggatgctaggtcgcctcgcccaggcatatcatcggctgagaaagagggaaacgcagaaattttgccttactccacgcttgtctctgcagctctactatatcccggtactggcccccgagaagcctgctgcctcccgacaaccagagttaggcgaactggcaacattccttgggcgggttgatccctggtaccagtcaaatgtgaacaccttgtgtcctgcgatacacaagctcgctgagatgccacccagtctggacactagccgtacagtcgatccgtttattctagacgtgatcacctattacattagaatgggaacgcagcctatctatttccagatctacaccgtcaaaatatttttctccgatctgtctcaagacccaacagaagatatttttctcatcgagctgaaggtgaaaattcaggacagcaagttccccaaagatggcttctcacctaggcgccggggtgttgccgaagggcccggcgcagagcttagtttgtgctaccagaaggccctgttatcccatagaccaagggaggtgactgtaagcctccgagctaccggactgatccttaaagccatacctgcatctgacacagaagtctcaggcagtagccactgtcccctgccagctgccccggtgactgaccatacctgcttgaatgttaacgtgacagaggtcgtgaagtcctctaatctcgcggggaagtcgtttagcaccgtaactaacacgttccgcacaaataacattcagatccaatcccgggatcagagactgctaaccctgtcactcgacaaagatgaccagaggacttttcgtgatgtggttcgcttcgaagtcgccccttgccccgagccatgtagtggagctcaaaagtctaaagcaccctggctgaatcttcacggtcagcaggaagtggaggccatcaaggctaaacctaagccattgctgatgcccattaacacctttagcggcatcgtgcagtga

SEQ ID NO: 9233 - RNA, 2265 nt, synthetic construct
  misc_feature 1..2265: note = derived and/or modified sequence opt4 fromPI3K__Homo_sapiens__AAV30085
  source 1..2265: mol_type = other RNA
atggagagcagcgacgtggagctggacctgcagagaagcgtgcaggccgtgctgagagagctgagcacccaggcccccgccctgcagagcaaccagggcatgtggagatggagcctgcacaagaaggtggagagagaccccggcaagagccccgtgctggtgagaatcctgctgagagagctggagaaggccgagagccaggacctgagacacgtgatcatccccctgctgcacaccgtgatgtacgtgctgaccaaggccaccggcatcaccgaggagctgtaccagagaatctacgccttctgcaccagactgctgaccctgcccaccccctactgcaccgtggccctggactgcgccatcagactgaagaccgagatggccgtgcccggcaccctgtaccagagaatggtgatcgccgagcagaacctgaccaacgagctgtacccctaccaggagagagtgttcctgttcgtggaccccgagctggtgagcgccagcgtgtgcagcgccctgctgctggagatcgaggccgcccaggcccagcagacccccgagacctgcatgagacacgtggtgagccacgccctgcaggccgccctgggcgaggcctgccacgccggcgccctgcacagaaagctgcaggccagccccagaagaaccctggagcactacttccacgccgtggtggccgccctggagcagatggccagcgaggccagccccagcagagagggccacgtggagagactggaggagatctactgcagcctgctgggccccgccgccggcagatgcggcggcgacctggtgcaggagagaccccccagcatccccctgcccagcccctacatcaccttccacctgtggaccggcgaggagcagctgtggaaggagctggtgctgttcctgagacccagaagccagctgagactgagcgccgacctggaggtgctggacctgcagggcctgagacccgacagagagctggccagagtgagcgtgctgagcaccgacagcggcatcgagagagacctgcccaccggcgccgacgagctgcccgcccccggcagccccgagatggagagagccggcctgcagagaaagggcggcatcaagaagagagcctggcccctggacttcctgatgcccggcagctgggacggcccccccggcctgcacagaagaaccggcagacccagcggcgacggcgagatgctgcccggcgtgagcagactgcacaccgccagagtgctggtgctgggcgacgacagaatgctgggcagactggcccaggcctaccacagactgagaaagagagagacccagaagttctgcctgacccccagactgagcctgcagctgtactacatccccgtgctggcccccgagaagcccgccgccagcagacagcccgagctgggcgagctggccaccttcctgggcagagtggacccctggtaccagagcaacgtgaacaccctgtgccccgccatccacaagctggccgagatgccccccagcctggacaccagcagaaccgtggaccccttcatcctggacgtgatcacctactacatcagaatgggcacccagcccatctacttccagatctacaccgtgaagatcttcttcagcgacctgagccaggaccccaccgaggacatcttcctgatcgagctgaaggtgaagatccaggacagcaagttccccaaggacggcttcagccccagaagaagaggcgtggccgagggccccggcgccgagctgagcctgtgctaccagaaggccctgctgagccacagacccagagaggtgaccgtgagcctgagagccaccggcctgatcctgaaggccatccccgccagcgacaccgaggtgagcggcagcagccactgccccctgcccgccgcccccgtgaccgaccacacctgcctgaacgtgaacgtgaccgaggtggtgaagagcagcaacctggccggcaagagcttcagcaccgtgaccaacaccttcagaaccaacaacatccagatccagagcagagaccagagactgctgaccctgagcctggacaaggacgaccagagaaccttcagagacgtggtgagattcgaggtggccccctgccccgagccctgcagcggcgcccagaagagcaaggccccctggctgaacctgcacggccagcaggaggtggaggccatcaaggccaagcccaagcccctgctgatgcccatcaacaccttcagcggcatcgtgcagtga

SEQ ID NO: 9234 - RNA, 2265 nt, synthetic construct
  misc_feature 1..2265: note = derived and/or modified sequence opt5 fromPI3K__Homo_sapiens__AAV30085
  source 1..2265: mol_type = other RNA
atggagagctccgacgtggaactggatctccagagatctgtccaagccgttctgcgggagcttagcacccaggctcccgccctgcagtccaaccagggcatgtggcgctggtctctccacaagaaagtggaaagagaccctggaaagagcccggtgctggtccggatccttctgcgcgagctcgaaaaagcggagtcccaagatctgagacatgtgattatccccctgctccacacagttatgtacgtgctgacgaaggctaccgggattacagaggaactttatcagcggatctacgccttctgcacccgcctgctcacactgcctaccccctattgtacagtcgcccttgactgcgctattagactgaaaaccgagatggccgtgcctggcacgctctaccagcggatggttatcgctgaacagaatctgaccaacgagctgtatccctaccaagagcgcgtgtttctcttcgtcgatcctgaactggtgtctgccagcgtgtgttccgcgcttctgctcgagatcgaagccgctcaggcccagcagacaccggagacctgcatgagacatgtcgttagccacgctctgcaagccgcgcttggggaagcctgtcatgctggagccctgcaccggaagctccaggcttctccccgcagaacactggagcactattttcatgccgtggtggccgctctggagcagatggcgtccgaagccagcccttctcgggagggccacgtcgaacgcctcgaggaaatttactgctccctgcttgggcccgctgccggaagatgtggcggcgacctggtgcaagagcggcctcccagcatcccgctcccttctccctacattaccttccatctgtggacgggggaggaacagctttggaaggagctggttctctttctgagacctcgctcccagctgcggctcagcgccgatctggaagtgcttgacctgcagggactcagacccgatcgcgagctggctcgggtctccgtgctgtctacagacagcggcatcgaaagagatcttcccaccggggccgacgagctccctgcgccgggatcccccgagatggaacgcgctggcctgcaacggaaagggggaattaagaaaagagcctggcctctggatttcctcatgcccggcagctgggacggccctcccgggctgcaccgccggacaggaagaccgtctggcgacggggagatgcttcctggagtttcccgcctgcacaccgcccgggtgctcgtcctgggcgatgacagaatgctggggcggcttgctcaggcctatcatcgcctcagaaagcgggaaacccagaaattttgcctgacacccagactgagcctccagctgtactatatccctgtgcttgctcccgagaagcctgccgcgtctcgccaacccgagctgggagaactcgccacgttcctgggccgggtcgatccgtggtaccagagcaatgtgaacaccctgtgtcctgctattcacaaacttgccgagatgcctccctccctcgacacatctagaaccgttgatccctttatcctggacgtgatcacatattacattcgcatgggcacccagccgatctatttccagatttacacggtcaagatctttttcagcgatctgtcccaagaccccacagaagatatttttctcatcgagctgaaggtgaaaatccaggacagcaagttccctaaagatgggttctctcccagacggcgcggagttgctgaaggccctggggccgagctttccctgtgctaccagaaggcgctcctgagccatagaccccgggaggtgaccgtctctctgcgcgccaccggacttattctcaaagctatccctgcctccgacacagaagtgagcggctcctctcactgtcccctgccggctgcccctgtgaccgaccatacatgcctgaatgttaacgtcacggaggtggtcaagagctccaatctcgccgggaagtcttttagcaccgtgacaaacaccttcagaacaaataacattcagatccaatcccgggatcagcgcctgcttaccctgagcctcgacaaagatgaccagagaacgtttcgggatgtggttcgcttcgaagtggctccctgccctgagccctgttctggcgcgcaaaagtccaaagccccgtggctgaatctgcacggacagcaggaagtcgaggctattaaggccaaacctaagccccttctgatgcctatcaacacctttagcggcatcgtgcagtga

SEQ ID NO: 9235 - protein, 887 aa, synthetic construct
  REGION 1..887: note = PI3K__Homo_sapiens__Q8NEB9
MGEAEKFHYIYSCDLDINVQLKIGSLEGKREQKSYKAVLEDPMLKFSGLYQETCSDLYVTCQVFAEGKPLALPVRTSYKAFSTRWNWNEWLKLPVKYPDLPRNAQVALTIWDVYGPGKAVPVGGTTVSLFGKYGMFRQGMHDLKVWPNVEADGSEPTKTPGRTSSTLSEDQMSRLAKLTKAHRQGHMVKVDWLDRLTFREIEMINESEKRSSNFMYLMVEFRCVKCDDKEYGIVYYEKDGDESSPILTSFELVKVPDPQMSMENLVESKHHKLARSLRSGPSDHDLKPNAATRDQLNIIVSYPPTKQLTYEEQDLVWKFRYYLTNQEKALTKFLKCVNWDLPQEAKQALELLGKWKPMDVEDSLELLSSHYTNPTVRRYAVARLRQADDEDLLMYLLQLVQALKYENFDDIKNGLEPTKKDSQSSVSENVSNSGINSAEIDSSQIITSPLPSVSSPPPASKTKEVPDGENLEQDLCTFLISRACKNSTLANYLYWYVIVECEDQDTQQRDPKTHEMYLNVMRRFSQALLKGDKSVRVMRSLLAAQQTFVDRLVHLMKAVQRESGNRKKKNERLQALLGDNEKMNLSDVELIPLPLEPQVKIRGIIPETATLFKSALMPAQLFFKTEDGGKYPVIFKHGDDLRQDQLILQIISLMDKLLRKENLDLKLTPYKVLATSTKHGFMQFIQSVPVAEVLDTEGSIQNFFRKYAPSENGPNGISAEVMDTYVKSCAGYCVITYILGVGDRHLDNLLLTKTGKLFHIDFGYILGRDPKPLPPPMKLNKEMVEGMGGTQSEQYQEFRKQCYTAFLHLRRYSNLILNLFSLMVDANIPDIALEPDKTVKKVQDKFRLDLSDEEAVHYMQSLIDESVHALFAAVVEQIHKFAQYWRK

SEQ ID NO: 9236 - RNA, 2664 nt, synthetic construct
  misc_feature 1..2664: note = PI3K__Homo_sapiens__AAH33004
  source 1..2664: mol_type = other RNA
atgggggaagcagagaagtttcactacatctatagttgtgacctggatatcaacgtccagcttaagataggaagcttggaagggaagagagaacaaaagagttataaagctgtcctggaagacccaatgttgaagttctcaggactatatcaagagacatgctctgatctttatgttacttgtcaagtttttgcagaagggaagcctttggccttgccagtgagaacatcctacaaagcatttagtacaagatggaactggaatgaatggctgaaactaccagtaaaataccctgacctgcccaggaatgcccaagtggccctcaccatatgggatgtgtatggtcccggaaaagcagtgcctgtaggaggaacaacggtttcgctctttggaaaatacggcatgtttcgccaagggatgcatgacttgaaagtctggcctaatgtagaagcagatggatcagaacccacaaaaactcctggcagaacaagtagcactctctcagaagatcagatgagccgtcttgccaagctcaccaaagctcatcgacaaggacacatggtgaaagtagattggctggatagattgacatttagagaaatagaaatgataaatgagagtgaaaaacgaagttctaatttcatgtacctgatggttgaatttcgatgtgtcaagtgtgatgataaggaatatggtattgtttattatgaaaaggacggtgatgaatcatctccaattttaacaagttttgaattagtgaaagttcctgacccccagatgtctatggagaatttagttgagagcaaacaccacaagcttgcccggagtttaagaagtggaccttctgaccacgatctgaaacccaatgctgccacgagagatcagttaaatattattgtgagttatccaccaaccaagcaacttacatatgaagaacaagatcttgtttggaagtttagatattatcttacgaatcaagaaaaagccttgacaaaattcttgaaatgtgttaattgggatctacctcaagaggccaaacaggccttggaacttctgggaaaatggaagccgatggatgtagaggactccttggagctgttatcctctcattacaccaacccaactgtgaggcgttatgctgttgcccggttgcgacaggccgatgatgaggatttgttgatgtacctattacaattggtccaggctctcaaatatgaaaattttgatgatataaagaatggattggaacctaccaagaaggatagtcagagttcagtgtcagaaaatgtgtcaaattctggaataaattctgcagaaatagatagctcccaaattataaccagcccccttccttcagtctcttcacctcctcctgcatcaaaaacaaaagaagttccagatggcgaaaatctggaacaagatctctgtaccttcttgatatcgagagcctgcaaaaactcaacactggctaattatttatactggtatgtgatagtggaatgtgaagatcaagatactcagcagagagatccaaagacccatgagatgtacttgaacgtaatgagaagattcagccaagcattgttgaagggtgataagtctgtcagagttatgcgttctttgctggctgcacaacagacatttgtagatcggttggtgcatctaatgaaggcagtacaacgcgaaagtggaaatcgtaagaaaaagaatgagagactacaggcattgcttggagataatgaaaagatgaatttgtcagatgtggaacttatcccgttgcctttagaaccccaagtgaaaattagaggaataattccggaaacagctacactgtttaaaagtgcccttatgcctgcacagttgttttttaagacggaagatggaggcaaatatccagttatatttaagcatggagatgatttacgtcaagatcaacttattcttcaaatcatttcactcatggacaagctgttacggaaagaaaatctggacttgaaattgacaccttataaggtgttagccaccagtacaaaacatggcttcatgcagtttatccagtcagttcctgtggctgaagttcttgatacagagggaagcattcagaacttttttagaaaatatgcaccaagtgagaatgggccaaatgggattagtgctgaggtcatggacacttacgttaaaagctgtgctggatattgcgtgatcacctatatacttggagttggagacaggcacctggataaccttttgctaacaaaaacaggcaaactcttccacatagactttggatatattttgggtcgggatccaaagcctcttcctccaccaatgaagctgaataaagaaatggtagaaggaatggggggcacacagagtgagcagtaccaagagttccgtaaacagtgttacacggctttcctccacctgcgaaggtattctaatctgattttgaacttgttttccttgatggttgatgcaaacattccagatattgcacttgaaccagataaaactgtgaaaaaggttcaggataaattccgcttagacctgtcggatgaagaggctgtgcattacatgcagagtctgattgatgagagtgtccatgctctttttgctgcagtggtggaacagattcacaagtttgcccagtactggagaaaatga

SEQ ID NO: 9237 - RNA, 2664 nt, synthetic construct
  misc_feature 1..2664: note = derived and/or modified sequence opt1 fromPI3K__Homo_sapiens__AAH33004
  source 1..2664: mol_type = other RNA
atgggcgaggccgagaagttccactacatctacagctgcgacctggacatcaacgtgcagctcaagatcgggtccctggagggcaagcgcgagcagaagtcctacaaggccgtcctggaggaccccatgctcaagttctccgggctgtaccaggagacctgcagcgacctgtacgtgacctgccaggtgttcgcggagggcaagcccctcgccctgcccgtccggacgtcctacaaggccttcagcacccgctggaactggaacgagtggctgaagctccccgtgaagtaccccgacctgccgcggaacgcccaggtggccctgaccatctgggacgtctacgggcccggcaaggcggtgcccgtgggcgggaccacggtctccctcttcggcaagtacgggatgttccgccagggcatgcacgacctgaaggtgtggcccaacgtggaggccgacgggagcgagccgaccaagacccccggccggacctccagcacgctgtccgaggaccagatgagccgcctcgccaagctgaccaaggcccaccggcagggccacatggtcaaggtggactggctggaccgcctcaccttccgggagatcgagatgatcaacgagtccgagaagcgcagctccaacttcatgtacctgatggtggagttccggtgcgtcaagtgcgacgacaaggagtacgggatcgtgtactacgagaaggacggcgacgagagctcccccatcctgaccagcttcgagctcgtgaaggtccccgacccgcagatgtccatggagaacctggtggagagcaagcaccacaagctggcgcgcagcctccggtccgggcccagcgaccacgacctgaagcccaacgccgccacgcgcgaccagctgaacatcatcgtgtcctacccgcccaccaagcagctcacctacgaggagcaggacctggtctggaagttccggtactacctgaccaaccaggagaaggccctcacgaagttcctgaagtgcgtgaactgggacctgccccaggaggccaagcaggcgctcgagctgctgggcaagtggaagcccatggacgtggaggacagcctcgagctgctgtccagccactacaccaaccccaccgtccgccggtacgccgtggcccgcctccggcaggccgacgacgaggacctgctgatgtacctcctgcagctggtccaggccctcaagtacgagaacttcgacgacatcaagaacggcctggagccgaccaagaaggactcccagagctccgtgagcgagaacgtgtccaacagcgggatcaactccgcggagatcgacagctcccagatcatcacgagccccctgccctccgtcagcagcccgccgcccgccagcaagaccaaggaggtgcccgacggcgagaacctcgagcaggacctgtgcaccttcctgatcagccgcgcctgcaagaactccaccctggccaactacctctactggtacgtgatcgtcgagtgcgaggaccaggacacgcagcagcgggaccccaagacccacgagatgtacctgaacgtgatgcgccgcttcagccaggccctgctcaagggggacaagtccgtgcgggtcatgcgcagcctgctggcggcccagcagaccttcgtggaccggctcgtgcacctgatgaaggccgtccagcgcgagtccggcaaccggaagaagaagaacgagcgcctgcaggccctcctgggggacaacgagaagatgaacctgagcgacgtggagctcatccccctgcccctggagccccaggtgaagatccggggcatcatcccggagaccgccaccctcttcaagtccgcgctgatgcccgcccagctgttcttcaagacggaggacggcgggaagtaccccgtcatcttcaagcacggcgacgacctccgccaggaccagctgatcctgcagatcatcagcctcatggacaagctgctgcggaaggagaacctcgacctgaagctgaccccctacaaggtgctcgccacctccacgaagcacgggttcatgcagttcatccagagcgtgccggtcgccgaggtgctggacaccgagggctccatccagaacttcttccgcaagtacgcgcccagcgagaacgggcccaacggcatctccgccgaggtgatggacacctacgtcaagagctgcgccggctactgcgtgatcacctacatcctgggggtgggcgaccggcacctcgacaacctgctgctcacgaagaccgggaagctgttccacatcgacttcggctacatcctggggcgcgaccccaagccgctcccgccgcccatgaagctgaacaaggagatggtcgagggcatgggcgggacccagtccgagcagtaccaggagttccggaagcagtgctacaccgccttcctgcacctccgccggtacagcaacctgatcctgaacctcttctccctgatggtggacgccaacatccccgacatcgcgctggagcccgacaagaccgtgaagaaggtccaggacaagttccgcctcgacctgagcgacgaggaggccgtgcactacatgcagagcctgatcgacgagtccgtgcacgccctcttcgccgccgtcgtggagcagatccacaagttcgcgcagtactggcggaagtga

SEQ ID NO: 9238 - RNA, 2664 nt, synthetic construct
  misc_feature 1..2664: note = derived and/or modified sequence opt2 fromPI3K__Homo_sapiens__AAH33004
  source 1..2664: mol_type = other RNA
atgggcgaggccgagaagttccactacatctactcctgcgacctcgacatcaacgtccagctcaagatcggctccctcgagggcaagcgcgagcagaagtcctacaaggccgtcctcgaggaccccatgctcaagttctccggcctctaccaggagacctgctccgacctctacgtcacctgccaggtcttcgccgagggcaagcccctcgccctccccgtccgcacctcctacaaggccttctccacccgctggaactggaacgagtggctcaagctccccgtcaagtaccccgacctcccccgcaacgcccaggtcgccctcaccatctgggacgtctacggccccggcaaggccgtccccgtcggcggcaccaccgtctccctcttcggcaagtacggcatgttccgccagggcatgcacgacctcaaggtctggcccaacgtcgaggccgacggctccgagcccaccaagacccccggccgcacctcctccaccctctccgaggaccagatgtcccgcctcgccaagctcaccaaggcccaccgccagggccacatggtcaaggtcgactggctcgaccgcctcaccttccgcgagatcgagatgatcaacgagtccgagaagcgctcctccaacttcatgtacctcatggtcgagttccgctgcgtcaagtgcgacgacaaggagtacggcatcgtctactacgagaaggacggcgacgagtcctcccccatcctcacctccttcgagctcgtcaaggtccccgacccccagatgtccatggagaacctcgtcgagtccaagcaccacaagctcgcccgctccctccgctccggcccctccgaccacgacctcaagcccaacgccgccacccgcgaccagctcaacatcatcgtctcctacccccccaccaagcagctcacctacgaggagcaggacctcgtctggaagttccgctactacctcaccaaccaggagaaggccctcaccaagttcctcaagtgcgtcaactgggacctcccccaggaggccaagcaggccctcgagctcctcggcaagtggaagcccatggacgtcgaggactccctcgagctcctctcctcccactacaccaaccccaccgtccgccgctacgccgtcgcccgcctccgccaggccgacgacgaggacctcctcatgtacctcctccagctcgtccaggccctcaagtacgagaacttcgacgacatcaagaacggcctcgagcccaccaagaaggactcccagtcctccgtctccgagaacgtctccaactccggcatcaactccgccgagatcgactcctcccagatcatcacctcccccctcccctccgtctcctcccccccccccgcctccaagaccaaggaggtccccgacggcgagaacctcgagcaggacctctgcaccttcctcatctcccgcgcctgcaagaactccaccctcgccaactacctctactggtacgtcatcgtcgagtgcgaggaccaggacacccagcagcgcgaccccaagacccacgagatgtacctcaacgtcatgcgccgcttctcccaggccctcctcaagggcgacaagtccgtccgcgtcatgcgctccctcctcgccgcccagcagaccttcgtcgaccgcctcgtccacctcatgaaggccgtccagcgcgagtccggcaaccgcaagaagaagaacgagcgcctccaggccctcctcggcgacaacgagaagatgaacctctccgacgtcgagctcatccccctccccctcgagccccaggtcaagatccgcggcatcatccccgagaccgccaccctcttcaagtccgccctcatgcccgcccagctcttcttcaagaccgaggacggcggcaagtaccccgtcatcttcaagcacggcgacgacctccgccaggaccagctcatcctccagatcatctccctcatggacaagctcctccgcaaggagaacctcgacctcaagctcaccccctacaaggtcctcgccacctccaccaagcacggcttcatgcagttcatccagtccgtccccgtcgccgaggtcctcgacaccgagggctccatccagaacttcttccgcaagtacgccccctccgagaacggccccaacggcatctccgccgaggtcatggacacctacgtcaagtcctgcgccggctactgcgtcatcacctacatcctcggcgtcggcgaccgccacctcgacaacctcctcctcaccaagaccggcaagctcttccacatcgacttcggctacatcctcggccgcgaccccaagcccctccccccccccatgaagctcaacaaggagatggtcgagggcatgggcggcacccagtccgagcagtaccaggagttccgcaagcagtgctacaccgccttcctccacctccgccgctactccaacctcatcctcaacctcttctccctcatggtcgacgccaacatccccgacatcgccctcgagcccgacaagaccgtcaagaaggtccaggacaagttccgcctcgacctctccgacgaggaggccgtccactacatgcagtccctcatcgacgagtccgtccacgccctcttcgccgccgtcgtcgagcagatccacaagttcgcccagtactggcgcaagtga

SEQ ID NO: 9239 - RNA, 2664 nt, synthetic construct
  misc_feature 1..2664: note = derived and/or modified sequence opt3 fromPI3K__Homo_sapiens__AAH33004
  source 1..2664: mol_type = other RNA
atgggcgaggccgaaaagttccactacatctatagctgcgacctggatattaacgtgcagctcaaaatagggtcccttgagggaaagagagaacaaaaatcttacaaggctgtcctggaggaccccatgttgaaattttcaggtttatatcaggaaacctgtagtgatctgtacgttacatgccaggtgttcgcagagggcaagcctctagccctcccagtaaggactagctataaggcgttttccacgcggtggaattggaacgagtggctgaaacttccggtgaagtaccccgacctgcctcgcaatgctcaggtcgccttgaccatctgggatgtgtatgggccaggaaaagcagttcccgtgggcggtacaactgtctctctcttcgggaagtacggaatgtttcgacaaggcatgcatgacctgaaagtgtggcctaacgtagaagccgatggctcggagccaaccaagacacccgggcgtacctcaagcactctgagtgaagaccagatgtccagactcgctaagttaacaaaagcacacaggcagggacatatggttaaggtggattggctggaccggcttaccttccgcgagattgagatgatcaatgaatctgagaaaagaagctccaactttatgtacttgatggtcgagttcaggtgtgtgaagtgcgatgacaaagagtatggtattgtgtactatgaaaaggatggcgacgagtcaagtcctatcctgacgagctttgagctagtcaaagttccagacccgcagatgtctatggaaaatctcgtggagtccaagcaccataagctggcccggtcacttcgcagcgggcccagtgatcacgacctgaaacctaacgctgccactcgagatcaattgaatataatcgtatcttacccacccaccaagcagctcacatatgaagaacaggacctggtgtggaaattcagatactatttaactaaccaggaaaaggcgctgaccaaatttctcaagtgtgtcaattgggatcttcctcaagaggcaaagcaggccctggagttgctaggaaaatggaagccaatggacgtggaagattccctggagctcctgagctcgcactacacaaaccccaccgttaggcggtacgctgtggcccgtcttcgccaggcagacgatgaagacctgttgatgtatctcctgcaattagtccaggctctgaaatacgagaatttcgatgacattaagaacggcctagaaccgacgaaaaaggactctcagtcctcagtgagtgagaatgtaagcaactccggtatcaactctgccgagattgatagctcacagatcataacaagtcctctcccctccgttagctctccacctcccgcgtcaaagactaaagaagtgccagacggggagaatctggaacaagatctttgcacctttttgattagtagagcctgtaagaacagcactctggcaaattatctctactggtatgtcatcgtggagtgcgaggaccaggatacacagcagagggaccccaaaacccatgaaatgtacctgaacgtcatgcggcgattctcccaagctctgctgaagggagataaatctgtgcgcgttatgagatcgttgctcgccgctcagcagacgttcgtggacaggctggtacacttaatgaaggccgtccagcgggagagcggcaatcgcaagaaaaagaacgaaagactgcaagcactactcggcgataatgagaaaatgaacctgtccgacgtggaacttattcctttgccactggagccgcaggttaagatcagggggatcattcccgagaccgccacactctttaaatcagctctgatgcctgcgcagttattctttaagactgaagatggaggtaaatatccagtgatattcaagcatggcgacgatctgcgtcaggaccaacttatcttgcagattatcagtctcatggacaagctgctacggaaagagaatctggatctcaagctgaccccctacaaagtccttgcaacatctactaagcacgggtttatgcagttcatacaaagcgtgcctgtagccgaagtgttggacaccgagggatccattcagaactttttccgaaaatacgctccatcagaaaatggccccaacggtatcagcgccgaggttatggatacatatgtcaagtcttgtgcagggtactgcgtgatcacctatattctgggcgtgggagacagacacttagataatctcctgcttactaagacgggcaaactgtttcatatcgacttcgggtacattttgggaagggatccgaagcctctcccaccccctatgaaactgaacaaggagatggtcgaaggtatgggcgggacacagtccgagcagtatcaagaatttcgcaaacagtgttacaccgccttcctacaccttcggagatatagtaatctcatactgaacctttttagcttgatggttgacgctaacatccccgatattgccctggagccagacaagactgtgaagaaagtgcaggataagttcaggttagacctctctgatgaagaggcagtacattacatgcagtccctgatcgacgagtcagtccacgcgcttttcgctgccgtggttgaacaaatccataaatttgcacagtactggcgcaagtga

SEQ ID NO: 9240 - RNA, 2664 nt, synthetic construct
  misc_feature 1..2664: note = derived and/or modified sequence opt4 fromPI3K__Homo_sapiens__AAH33004
  source 1..2664: mol_type = other RNA
atgggcgaggccgagaagttccactacatctacagctgcgacctggacatcaacgtgcagctgaagatcggcagcctggagggcaagagagagcagaagagctacaaggccgtgctggaggaccccatgctgaagttcagcggcctgtaccaggagacctgcagcgacctgtacgtgacctgccaggtgttcgccgagggcaagcccctggccctgcccgtgagaaccagctacaaggccttcagcaccagatggaactggaacgagtggctgaagctgcccgtgaagtaccccgacctgcccagaaacgcccaggtggccctgaccatctgggacgtgtacggccccggcaaggccgtgcccgtgggcggcaccaccgtgagcctgttcggcaagtacggcatgttcagacagggcatgcacgacctgaaggtgtggcccaacgtggaggccgacggcagcgagcccaccaagacccccggcagaaccagcagcaccctgagcgaggaccagatgagcagactggccaagctgaccaaggcccacagacagggccacatggtgaaggtggactggctggacagactgaccttcagagagatcgagatgatcaacgagagcgagaagagaagcagcaacttcatgtacctgatggtggagttcagatgcgtgaagtgcgacgacaaggagtacggcatcgtgtactacgagaaggacggcgacgagagcagccccatcctgaccagcttcgagctggtgaaggtgcccgacccccagatgagcatggagaacctggtggagagcaagcaccacaagctggccagaagcctgagaagcggccccagcgaccacgacctgaagcccaacgccgccaccagagaccagctgaacatcatcgtgagctacccccccaccaagcagctgacctacgaggagcaggacctggtgtggaagttcagatactacctgaccaaccaggagaaggccctgaccaagttcctgaagtgcgtgaactgggacctgccccaggaggccaagcaggccctggagctgctgggcaagtggaagcccatggacgtggaggacagcctggagctgctgagcagccactacaccaaccccaccgtgagaagatacgccgtggccagactgagacaggccgacgacgaggacctgctgatgtacctgctgcagctggtgcaggccctgaagtacgagaacttcgacgacatcaagaacggcctggagcccaccaagaaggacagccagagcagcgtgagcgagaacgtgagcaacagcggcatcaacagcgccgagatcgacagcagccagatcatcaccagccccctgcccagcgtgagcagccccccccccgccagcaagaccaaggaggtgcccgacggcgagaacctggagcaggacctgtgcaccttcctgatcagcagagcctgcaagaacagcaccctggccaactacctgtactggtacgtgatcgtggagtgcgaggaccaggacacccagcagagagaccccaagacccacgagatgtacctgaacgtgatgagaagattcagccaggccctgctgaagggcgacaagagcgtgagagtgatgagaagcctgctggccgcccagcagaccttcgtggacagactggtgcacctgatgaaggccgtgcagagagagagcggcaacagaaagaagaagaacgagagactgcaggccctgctgggcgacaacgagaagatgaacctgagcgacgtggagctgatccccctgcccctggagccccaggtgaagatcagaggcatcatccccgagaccgccaccctgttcaagagcgccctgatgcccgcccagctgttcttcaagaccgaggacggcggcaagtaccccgtgatcttcaagcacggcgacgacctgagacaggaccagctgatcctgcagatcatcagcctgatggacaagctgctgagaaaggagaacctggacctgaagctgaccccctacaaggtgctggccaccagcaccaagcacggcttcatgcagttcatccagagcgtgcccgtggccgaggtgctggacaccgagggcagcatccagaacttcttcagaaagtacgcccccagcgagaacggccccaacggcatcagcgccgaggtgatggacacctacgtgaagagctgcgccggctactgcgtgatcacctacatcctgggcgtgggcgacagacacctggacaacctgctgctgaccaagaccggcaagctgttccacatcgacttcggctacatcctgggcagagaccccaagcccctgcccccccccatgaagctgaacaaggagatggtggagggcatgggcggcacccagagcgagcagtaccaggagttcagaaagcagtgctacaccgccttcctgcacctgagaagatacagcaacctgatcctgaacctgttcagcctgatggtggacgccaacatccccgacatcgccctggagcccgacaagaccgtgaagaaggtgcaggacaagttcagactggacctgagcgacgaggaggccgtgcactacatgcagagcctgatcgacgagagcgtgcacgccctgttcgccgccgtggtggagcagatccacaagttcgcccagtactggagaaagtga

SEQ ID NO: 9241 - RNA, 2664 nt, synthetic construct
  misc_feature 1..2664: note = derived and/or modified sequence opt5 fromPI3K__Homo_sapiens__AAH33004
  source 1..2664: mol_type = other RNA
atgggcgaggccgaaaagttccactacatctatagctgcgacctggatattaacgtgcagctcaaaatcgggtccctggagggaaagagagaacaaaaatcttacaaggctgtccttgaggaccccatgctgaaatttagcggcctctatcaggaaacctgttccgatctgtacgttacatgccaggtgttcgccgaggggaagcctcttgcgctgccggtgcggacgtcttataaggcttttagcacccgctggaattggaacgagtggctcaaactgcccgtcaagtaccctgacctgcccagaaatgcccaggtggccctcacaatttgggatgtttatggacctggcaaagctgtgcccgtcgggggaaccacagtgtccctgttcggcaagtacggcatgtttcggcaagggatgcatgaccttaaagtttggcctaacgtggaagccgatggatctgagccgaccaagacacccggccgcaccagctccacgctgagcgaagaccagatgtctagactcgctaagctgaccaaagcccaccggcaggggcatatggtcaaggtggattggcttgaccgcctgacattcagagagatcgagatgattaatgaatccgagaaacggagctctaactttatgtacctcatggtggagttccgctgtgtcaagtgcgatgacaaagagtatggaatcgtttactatgaaaaggatggcgacgagtccagccctatcctgacctcttttgagctggtgaaagtgcccgaccctcagatgtccatggaaaatctcgtcgagagcaagcaccataagctggcgagatcccttcggtctgggcccagcgatcacgacctgaaaccgaacgccgctacacgcgatcaactcaatattatcgtgtcctaccctcccaccaagcagctgacgtatgaagaacaggaccttgtttggaaattcagatactatctgacaaaccaggaaaaggccctcaccaaatttctgaagtgtgtgaattgggatctgcctcaagaggctaagcaggccctcgagctgcttggaaaatggaagcccatggacgtcgaagatagcctggagctcctgtcttcccactacacaaaccccaccgtgcggcgctacgcggttgccagacttcggcaggctgacgatgaagacctgctcatgtatctgctgcaactcgtgcaggccctgaaatacgagaatttcgatgacattaagaacggccttgaacctaccaaaaaggacagccagtctagcgtctccgagaatgtgtctaacagcggcatcaactccgctgagattgatagctctcagatcattacatccccgctgcccagcgtctcttcccctccccctgccagcaagacgaaagaagtgcccgacggggagaatctcgaacaagatctgtgcacctttctgatctccagagcctgtaagaactctacacttgctaattatctctactggtatgttatcgtggagtgcgaggaccaggatacccagcagcgcgacccgaaaacacatgaaatgtacctgaacgtcatgcggagattcagccaagcgctgctcaagggagataaatccgtgcgcgttatgcggtctctgcttgccgctcagcagaccttcgtggacagactggtccacctcatgaaggccgtgcagcgcgagagcggcaatcggaagaaaaagaacgaaagactgcaagccctgcttggggataatgagaaaatgaacctctccgacgtggaactgattcctctgcccctcgagcctcaggttaagatccgcggaattatccccgagacggctacactgtttaaaagcgcccttatgcctgcgcagctgttctttaagaccgaagatggcgggaaatatcccgtcattttcaagcatggagacgatctccggcaggaccaactgatcctgcagatcatttctcttatggacaagctcctgagaaaagagaatctggatctcaagctgaccccgtacaaagtgcttgctacatccaccaagcacggctttatgcagttcatccaaagcgtgcctgtcgccgaagtgctggacacagagggctctattcagaactttttccgcaaatacgccccctccgaaaatgggcccaacggaatcagcgctgaggttatggatacgtatgtgaagtcttgtgccggctactgcgtcattacctatatcctcggggtgggagaccggcacctggataatctgcttctcacaaagaccggcaaactgtttcatatcgacttcgggtacattctgggcagagatcctaagccgctgccccctcccatgaaactgaacaaggagatggttgaaggaatgggcgggacacagagcgagcagtatcaagaatttcggaaacagtgttacaccgctttccttcacctccgcagatattccaatctcatcctgaacctgtttagccttatggtggacgccaacattcctgatatcgcgctggagcccgacaagacggtcaagaaagtgcaggataagttccggctcgacctgtctgatgaagaggccgttcattacatgcagtccctcattgacgagagcgtgcacgctctgttcgccgctgtcgtggaacaaatccataaatttgcccagtactggagaaagtga

SEQ ID NO: 9242 - protein, 880 aa, synthetic construct
  REGION 1..880: note = PI3K__Homo_sapiens__Q8WYR1
MQPGATTCTEDRIQHALERCLHGLSLSRRSTSWSAGLCLNCWSLQELVSRDPGHFLILLEQILQKTREVQEKGTYDLLTPLALLFYSTVLCTPHFPPDSDLLLKAASTYHRFLTWPVPYCSICQELLTFIDAELKAPGISYQRLVRAEQGLPIRSHRSSTVTVLLLNPVEVQAEFLAVANKLSTPGHSPHSAYTTLLLHAFQATFGAHCDVPGLHCRLQAKTLAELEDIFTETAEAQELASGIGDAAEARRWLRTKLQAVGEKAGFPGVLDTAKPGKLHTIPIPVARCYTYSWSQDSFDILQEILLKEQELLQPGILGDDEEEEEEEEEVEEDLETDGHCAERDSLLSTSSLASHDSTLSLASSQASGPALSRHLLTSFVSGLSDGMDSGYVEDSEESSSEWPWRRGSQERRGHRRPGQKFIRIYKLFKSTSQLVLRRDSRSLEGSSDTALPLRRAGSLCSPLDEPVSPPSRAQRSRSLPQPKLGTQLPSWLLAPASRPQRRRPFLSGDEDPKASTLRVVVFGSDRISGKVARAYSNLRRLENNRPLLTRFFKLQFFYVPVKRSHGTSPGACPPPRSQTPSPPTDSPRHASPGELGTTPWEESTNDISHYLGMLDPWYERNVLGLMHLPPEVLCQQSLKAEAQALEGSPTQLPILADMLLYYCRFAARPVLLQVYQTELTFITGEKTTEIFIHSLELGHSAATRAIKASGPGSKRLGIDGDREAVPLTLQIIYSKGAISGRSRWSNLEKVCTSVNLNKACRKQEELDSSMEALTLNLTEVVKRQNSKSKKGFNQISTSQIKVDKVQIIGSNSCPFAVCLDQDERKILQSVVRCEVSPCYKPEKSDLSSPPQTPPDLPAQAAPDLCSLLCLPIMTFSGALP

SEQ ID NO: 9243 - RNA, 2643 nt, synthetic construct
  misc_feature 1..2643: note = PI3K__Homo_sapiens__ABY87553
  source 1..2643: mol_type = other RNA
atgcagccaggggccacgacatgcacggaggaccgcatccagcatgccctggaacgctgcctgcatggactcagcctcagccgccgctccacctcctggtcagctgggctgtgtctgaactgctggagcctgcaggagctggtcagcagggacccgggccacttccttatcctccttgagcagatcctgcagaagacccgagaggtccaggagaagggcacctacgacctgctcaccccgctggccctgctcttctattccactgttctttgtacaccacacttcccaccagactcggatctccttctgaaggcagccagcacctaccaccggttcctgacctggcctgttccttactgcagcatctgccaggagctgctcaccttcattgatgctgaactcaaggccccagggatctcctaccagagactggtgagggctgagcagggcctgcccatcaggagtcaccgcagctccaccgtcaccgtgctgctgctgaacccagtggaagtgcaggccgagttccttgctgtagccaataagctgagtacgcccggacactcgcctcacagtgcctacaccaccctgctcctgcacgccttccaggccacctttggggcccactgtgacgtcccgggcctgcactgcaggctacaggccaagaccctggcagagcttgaggacatcttcacggagaccgcagaggcacaggagctggcatctggcatcggggatgctgcagaggcccggcggtggctcaggaccaagctgcaggcggtgggagaaaaagctggcttccctggggtgttagacactgcaaaaccagggaagctccataccatccccatccctgtcgccaggtgctacacctacagctggagccaggacagctttgacatcctgcaggaaatcctgctcaaggaacaggagctactccagccagggatcctgggagatgatgaagaggaggaagaggaggaggaggaggtggaggaggacttggaaactgacgggcactgtgccgagagagattccctgctctccaccagctctttggcgtcccatgactccaccctgtcccttgcatcctcccaggcctcggggccggccctctcgcgccatctgctgacttcctttgtctcaggcctctctgatggcatggacagcggctacgtggaggacagcgaggagagctcctccgagtggccttggaggcgtggcagccaggaacgccgaggccaccgcaggcctgggcagaagttcatcaggatctataaactcttcaagagcaccagccagctggtactgcggagggactctcggagcctggagggcagctcggacacggccctgcccctgaggcgggcagggagcctctgcagccccctggacgaaccagtatcacccccttcccgggcccagcgctcccgctccctgccccagcccaaactcggtacccagctgcccagctggcttctggcccctgcttcacgcccccagcgccgccgccccttcctgagtggagatgaggatcccaaggcttccacgctacgtgttgtggtctttggctccgatcggatttcagggaaggtggctcgggcgtacagcaaccttcggcggctggagaacaatcgcccactcctcacacggttcttcaaacttcagttcttctacgtgcctgtgaagcgaagtcatgggaccagccctggtgcctgtccaccccctcggagccagacgccctcacccccgacagactcccctaggcacgccagccctggagagctgggcaccaccccatgggaggagagcaccaatgacatctcccactacctcggcatgctggacccctggtatgagcgcaatgtactgggcctcatgcacctgccccctgaagtcctgtgccagcagtccctgaaggctgaagcccaggccctggagggctccccaacccagctgcccatcctggctgacatgctactctactactgccgctttgccgccagaccggtgctgctgcaagtctatcagaccgagctgaccttcatcactggggagaagacgacagagatcttcatccactccttggagctgggtcactccgctgccacacgtgccatcaaggcgtcaggtcctggcagcaagcggctgggcatcgatggcgaccgggaggctgttcctctaacactacagattatttacagcaagggggccatcagtggacgaagtcgctggagcaacctggagaaggtctgtacctccgtgaacctcaacaaggcctgccggaagcaggaggagctggattccagcatggaggccctgacgctaaacctgacagaagtggtgaaaaggcagaactccaaatccaagaagggctttaaccagattagcacatcgcagatcaaagtggacaaggtgcagatcatcggctccaacagctgcccctttgctgtgtgcctggaccaggatgagagaaagatcctgcagagtgtagtcagatgtgaggtctcaccgtgctacaagccagagaagagcgacctctcctcaccaccccagacgcctcctgacctgccggcccaggccgcacctgatctctgctcccttctctgcctgcccatcatgactttcagtggagctctgccctag

SEQ ID NO: 9244 - RNA, 2643 nt, synthetic construct
  misc_feature 1..2643: note = derived and/or modified sequence opt1 fromPI3K__Homo_sapiens__ABY87553
  source 1..2643: mol_type = other RNA
atgcagcccggcgccacgacctgcacggaggaccgcatccagcacgccctggagcggtgcctccacgggctgagcctgtcccgccggagcacctcctggagcgcgggcctctgcctgaactgctggtccctgcaggagctcgtgagccgcgacccggggcacttcctgatcctgctcgagcagatcctgcagaagacccgggaggtccaggagaagggcacctacgacctgctcacgcccctggccctcctcttctactccaccgtgctgtgcacgccccacttcccgcccgacagcgacctgctcctgaaggccgcctccacctaccaccgcttcctgacctggcccgtgccctactgcagcatctgccaggagctcctgaccttcatcgacgccgagctgaaggcgcccgggatctcctaccagcggctcgtccgcgccgagcagggcctgccgatccggagccaccgctccagcaccgtgaccgtgctgctcctgaaccccgtcgaggtgcaggccgagttcctggccgtggcgaacaagctctccacgcccggccacagcccccactccgcctacaccaccctgctgctccacgccttccaggccaccttcggggcccactgcgacgtcccgggcctgcactgccggctgcaggcgaagacgctcgccgagctggaggacatcttcaccgagaccgccgaggcccaggagctggccagcgggatcggcgacgcggccgaggcccgccggtggctccgcaccaagctgcaggccgtgggggagaaggccggcttccccggcgtgctggacacggcgaagcccgggaagctccacaccatccccatcccggtcgcccggtgctacacctactcctggagccaggacagcttcgacatcctgcaggagatcctgctgaaggagcaggagctgctgcagcccggcatcctcggggacgacgaggaggaggaggaggaggaggaggaggtggaggaggacctggagaccgacggccactgcgccgagcgcgactccctgctgagcacctccagcctcgcctcccacgacagcaccctgtccctggccagctcccaggcgagcggccccgccctctcccggcacctcctgaccagcttcgtgtccgggctgagcgacggcatggactccgggtacgtcgaggacagcgaggagtccagctccgagtggccctggcgccggggcagccaggagcgccgggggcaccgccgcccgggccagaagttcatccggatctacaagctgttcaagagcacctcccagctggtgctccgccgggacagccgctccctggagggcagctccgacacggccctgcccctccggcgcgccgggagcctgtgcagccccctggacgagcccgtgtccccgccctcccgggcgcagcgcagccggtccctcccccagcccaagctgggcacccagctgccgagctggctcctggcccccgcctcccgcccccagcggcgccggccgttcctgagcggggacgaggaccccaaggcctccaccctccgcgtcgtggtgttcggcagcgaccggatctccgggaaggtcgcccgcgcgtacagcaacctgcggcgcctggagaacaaccggcccctcctgacccgcttcttcaagctgcagttcttctacgtgcccgtgaagcgcagccacggcacgtccccgggcgcctgcccgccgccccggagccagaccccctccccgcccaccgacagcccccgccacgcctcccccggggagctcggcaccacgccctgggaggagagcaccaacgacatctcccactacctggggatgctggacccctggtacgagcggaacgtcctcggcctgatgcacctcccgcccgaggtgctgtgccagcagagcctgaaggccgaggcccaggcgctggaggggtcccccacccagctccccatcctggccgacatgctgctctactactgccgcttcgccgcccggcccgtcctgctccaggtgtaccagaccgagctgaccttcatcacgggcgagaagaccaccgagatcttcatccacagcctggagctgggccactccgccgcgacccgcgccatcaaggccagcgggcccggctccaagcggctcgggatcgacggcgaccgcgaggccgtgcccctgacgctgcagatcatctacagcaagggcgcgatctccgggcggagccgctggtccaacctcgagaaggtctgcaccagcgtgaacctgaacaaggcctgccggaagcaggaggagctggactccagcatggaggccctcaccctgaacctgaccgaggtggtcaagcgccagaacagcaagtccaagaagggcttcaaccagatcagcacgtcccagatcaaggtggacaaggtgcagatcatcgggagcaactcctgccccttcgccgtctgcctcgaccaggacgagcggaagatcctgcagagcgtggtgcgctgcgaggtctccccctgctacaagccggagaagtccgacctgagcagcccgccccagaccccgcccgacctccccgcccaggcggcccccgacctgtgctccctgctctgcctgcccatcatgaccttcagcggcgccctgccctga

SEQ ID NO: 9245 - RNA, 2643 nt, synthetic construct
  misc_feature 1..2643: note = derived and/or modified sequence opt2 fromPI3K__Homo_sapiens__ABY87553
  source 1..2643: mol_type = other RNA
atgcagcccggcgccaccacctgcaccgaggaccgcatccagcacgccctcgagcgctgcctccacggcctctccctctcccgccgctccacctcctggtccgccggcctctgcctcaactgctggtccctccaggagctcgtctcccgcgaccccggccacttcctcatcctcctcgagcagatcctccagaagacccgcgaggtccaggagaagggcacctacgacctcctcacccccctcgccctcctcttctactccaccgtcctctgcaccccccacttcccccccgactccgacctcctcctcaaggccgcctccacctaccaccgcttcctcacctggcccgtcccctactgctccatctgccaggagctcctcaccttcatcgacgccgagctcaaggcccccggcatctcctaccagcgcctcgtccgcgccgagcagggcctccccatccgctcccaccgctcctccaccgtcaccgtcctcctcctcaaccccgtcgaggtccaggccgagttcctcgccgtcgccaacaagctctccacccccggccactccccccactccgcctacaccaccctcctcctccacgccttccaggccaccttcggcgcccactgcgacgtccccggcctccactgccgcctccaggccaagaccctcgccgagctcgaggacatcttcaccgagaccgccgaggcccaggagctcgcctccggcatcggcgacgccgccgaggcccgccgctggctccgcaccaagctccaggccgtcggcgagaaggccggcttccccggcgtcctcgacaccgccaagcccggcaagctccacaccatccccatccccgtcgcccgctgctacacctactcctggtcccaggactccttcgacatcctccaggagatcctcctcaaggagcaggagctcctccagcccggcatcctcggcgacgacgaggaggaggaggaggaggaggaggaggtcgaggaggacctcgagaccgacggccactgcgccgagcgcgactccctcctctccacctcctccctcgcctcccacgactccaccctctccctcgcctcctcccaggcctccggccccgccctctcccgccacctcctcacctccttcgtctccggcctctccgacggcatggactccggctacgtcgaggactccgaggagtcctcctccgagtggccctggcgccgcggctcccaggagcgccgcggccaccgccgccccggccagaagttcatccgcatctacaagctcttcaagtccacctcccagctcgtcctccgccgcgactcccgctccctcgagggctcctccgacaccgccctccccctccgccgcgccggctccctctgctcccccctcgacgagcccgtctcccccccctcccgcgcccagcgctcccgctccctcccccagcccaagctcggcacccagctcccctcctggctcctcgcccccgcctcccgcccccagcgccgccgccccttcctctccggcgacgaggaccccaaggcctccaccctccgcgtcgtcgtcttcggctccgaccgcatctccggcaaggtcgcccgcgcctactccaacctccgccgcctcgagaacaaccgccccctcctcacccgcttcttcaagctccagttcttctacgtccccgtcaagcgctcccacggcacctcccccggcgcctgcccccccccccgctcccagaccccctccccccccaccgactccccccgccacgcctcccccggcgagctcggcaccaccccctgggaggagtccaccaacgacatctcccactacctcggcatgctcgacccctggtacgagcgcaacgtcctcggcctcatgcacctcccccccgaggtcctctgccagcagtccctcaaggccgaggcccaggccctcgagggctcccccacccagctccccatcctcgccgacatgctcctctactactgccgcttcgccgcccgccccgtcctcctccaggtctaccagaccgagctcaccttcatcaccggcgagaagaccaccgagatcttcatccactccctcgagctcggccactccgccgccacccgcgccatcaaggcctccggccccggctccaagcgcctcggcatcgacggcgaccgcgaggccgtccccctcaccctccagatcatctactccaagggcgccatctccggccgctcccgctggtccaacctcgagaaggtctgcacctccgtcaacctcaacaaggcctgccgcaagcaggaggagctcgactcctccatggaggccctcaccctcaacctcaccgaggtcgtcaagcgccagaactccaagtccaagaagggcttcaaccagatctccacctcccagatcaaggtcgacaaggtccagatcatcggctccaactcctgccccttcgccgtctgcctcgaccaggacgagcgcaagatcctccagtccgtcgtccgctgcgaggtctccccctgctacaagcccgagaagtccgacctctcctcccccccccagaccccccccgacctccccgcccaggccgcccccgacctctgctccctcctctgcctccccatcatgaccttctccggcgccctcccctga

SEQ ID NO: 9246 - RNA, 2643 nt, synthetic construct
  misc_feature 1..2643: note = derived and/or modified sequence opt3 fromPI3K__Homo_sapiens__ABY87553
  source 1..2643: mol_type = other RNA
atgcagcccggcgccaccacatgcactgaggacagaatccaacacgctctggaaaggtgtctccatgggcttagcctgtcccggcgctctacgtcatggagtgcaggattgtgcttaaactgttggagcctgcaggagctagtgtcccgagatcctggtcacttcctcattctgcttgaacagatactgcagaagacccgtgaggtccaagaaaaaggcacatacgacttgctcactccactggccctgctcttttattctaccgttttatgcacaccgcattttccccctgattcggacctgcttttgaaggcggcttcaacctaccacagatttctgacttggccagtgccctattgtagcatctgccaggagctactcacattcattgatgccgagctgaaagcacctgggatcagttaccagaggcttgtacgggccgaacagggactgccaattcgctcccatagatctagcaccgtgacggtcttgctcctgaatcccgtggaggttcaagctgaatttttagcagtggccaacaagctgtccactcctggccactcaccacacagtgcttataccacactccttctgcatgccttccaggcgacttttggtgcacactgtgacgtcccggggttgcattgcaggctacaggccaaaaccctggctgagctcgaggatatcttcacagaaaccgccgaggcacaggaactggctagcggaataggcgacgccgcggaggcccggcgctggcttcgaacgaagctgcaagcagtgggcgaaaaggctgggtttcccggagtattggatactgccaaacctggtaagctccacacaatcccaattcccgttgctagatgttacacctattcttggtcccaggactcattcgatatcctgcaggagattttactgaaagagcaagaactactccagcctggcatcctgggggacgatgaggaagaggaagaggaggaagaggaagtggaggaagaccttgagactgacggacactgcgccgagagggatagcttgctgagtacatcttccctcgcaagccatgactcgaccctgtctcttgcctcctcacaggctagtggcccagcgctgagccggcacttgctcacgtcctttgtctctggtctgagcgatgggatggactcaggatacgtggaagatagtgaggaatccagctctgagtggccctggcgtcgcggctcacaggagagaaggggccatcggcgaccggggcaaaagttcatacgcatttacaaattatttaagagtaccagccagctggtgctaagaagggactcccggtctctcgaaggatcgagcgatacagcactgcctcttcgcagagccggttccttgtgttcacccctggacgagccagtcagtcctccctctagggctcagcgtagccggtccctcccacagcccaagctgggcactcaattaccttcatggctgcttgccccagcaagccgaccgcagagaaggcgccccttcttgtctggggatgaagaccctaaagcctccaccctccgggttgtggtattcggaagtgatagaatcagcggcaaggtggctagggcctattctaatctgcgccgactagagaacaatcggccactgctcacacgtttcttcaaactgcagtttttctacgtccccgtgaagagatcccacggtacttcacctggggcatgcccacccccgaggagtcagacccctagcccacccacagactcgcctcgccatgcgtcccccggcgaacttggaaccactccatgggaggagtctacgaacgacattagccactatttgggcatgctggatccttggtacgaacggaatgttttagggctcatgcatctgcccccagaggtgctttgccaacagtcactgaaagctgaagcccaggcattggagggaagtccgacacagctccctatcctggccgacatgctactgtattactgtagatttgctgccaggcccgtcctcctgcaagtgtatcagaccgaacttactttcatcaccggtgagaagacaaccgagatttttatacactccttggaactgggccactctgcagctactcgagccatcaaagcgagcgggccaggatccaagcgcttaggcattgatggtgaccgggaggccgtacccctcacactgcagatcatatactcaaagggggctattagcggcagaagtaggtggtctaaccttgaaaaagtttgcacgtccgtgaatctgaacaaggcatgtcgtaaacaagaggaactagatagctcgatggaggccctcaccctgaatttgactgaggtcgtgaagcgccagaactcaaaatctaagaagggattcaatcagatcagtacatcccagatcaaagtcgacaaggtgcaaattatcggcagcaactcttgcccttttgctgtttgtctggatcaggacgaacggaaaattttacagagcgtggtaagatgcgaggtctccccatgttacaagcccgaaaaatcagatctcagtagccctccgcagaccccacccgacctgcctgcccaagcagcgccagatctttgctctctgttgtgtctccccataatgacattctccggggccctgccttga

SEQ ID NO: 9247 - RNA, 2643 nt, synthetic construct
  misc_feature 1..2643: note = derived and/or modified sequence opt4 fromPI3K__Homo_sapiens__ABY87553
  source 1..2643: mol_type = other RNA
atgcagcccggcgccaccacctgcaccgaggacagaatccagcacgccctggagagatgcctgcacggcctgagcctgagcagaagaagcaccagctggagcgccggcctgtgcctgaactgctggagcctgcaggagctggtgagcagagaccccggccacttcctgatcctgctggagcagatcctgcagaagaccagagaggtgcaggagaagggcacctacgacctgctgacccccctggccctgctgttctacagcaccgtgctgtgcaccccccacttcccccccgacagcgacctgctgctgaaggccgccagcacctaccacagattcctgacctggcccgtgccctactgcagcatctgccaggagctgctgaccttcatcgacgccgagctgaaggcccccggcatcagctaccagagactggtgagagccgagcagggcctgcccatcagaagccacagaagcagcaccgtgaccgtgctgctgctgaaccccgtggaggtgcaggccgagttcctggccgtggccaacaagctgagcacccccggccacagcccccacagcgcctacaccaccctgctgctgcacgccttccaggccaccttcggcgcccactgcgacgtgcccggcctgcactgcagactgcaggccaagaccctggccgagctggaggacatcttcaccgagaccgccgaggcccaggagctggccagcggcatcggcgacgccgccgaggccagaagatggctgagaaccaagctgcaggccgtgggcgagaaggccggcttccccggcgtgctggacaccgccaagcccggcaagctgcacaccatccccatccccgtggccagatgctacacctacagctggagccaggacagcttcgacatcctgcaggagatcctgctgaaggagcaggagctgctgcagcccggcatcctgggcgacgacgaggaggaggaggaggaggaggaggaggtggaggaggacctggagaccgacggccactgcgccgagagagacagcctgctgagcaccagcagcctggccagccacgacagcaccctgagcctggccagcagccaggccagcggccccgccctgagcagacacctgctgaccagcttcgtgagcggcctgagcgacggcatggacagcggctacgtggaggacagcgaggagagcagcagcgagtggccctggagaagaggcagccaggagagaagaggccacagaagacccggccagaagttcatcagaatctacaagctgttcaagagcaccagccagctggtgctgagaagagacagcagaagcctggagggcagcagcgacaccgccctgcccctgagaagagccggcagcctgtgcagccccctggacgagcccgtgagcccccccagcagagcccagagaagcagaagcctgccccagcccaagctgggcacccagctgcccagctggctgctggcccccgccagcagaccccagagaagaagacccttcctgagcggcgacgaggaccccaaggccagcaccctgagagtggtggtgttcggcagcgacagaatcagcggcaaggtggccagagcctacagcaacctgagaagactggagaacaacagacccctgctgaccagattcttcaagctgcagttcttctacgtgcccgtgaagagaagccacggcaccagccccggcgcctgccccccccccagaagccagacccccagcccccccaccgacagccccagacacgccagccccggcgagctgggcaccaccccctgggaggagagcaccaacgacatcagccactacctgggcatgctggacccctggtacgagagaaacgtgctgggcctgatgcacctgccccccgaggtgctgtgccagcagagcctgaaggccgaggcccaggccctggagggcagccccacccagctgcccatcctggccgacatgctgctgtactactgcagattcgccgccagacccgtgctgctgcaggtgtaccagaccgagctgaccttcatcaccggcgagaagaccaccgagatcttcatccacagcctggagctgggccacagcgccgccaccagagccatcaaggccagcggccccggcagcaagagactgggcatcgacggcgacagagaggccgtgcccctgaccctgcagatcatctacagcaagggcgccatcagcggcagaagcagatggagcaacctggagaaggtgtgcaccagcgtgaacctgaacaaggcctgcagaaagcaggaggagctggacagcagcatggaggccctgaccctgaacctgaccgaggtggtgaagagacagaacagcaagagcaagaagggcttcaaccagatcagcaccagccagatcaaggtggacaaggtgcagatcatcggcagcaacagctgccccttcgccgtgtgcctggaccaggacgagagaaagatcctgcagagcgtggtgagatgcgaggtgagcccctgctacaagcccgagaagagcgacctgagcagccccccccagaccccccccgacctgcccgcccaggccgcccccgacctgtgcagcctgctgtgcctgcccatcatgaccttcagcggcgccctgccctga

SEQ ID NO: 9248 - RNA, 2643 nt, synthetic construct
  misc_feature 1..2643: note = derived and/or modified sequence opt5 fromPI3K__Homo_sapiens__ABY87553
  source 1..2643: mol_type = other RNA
atgcagcccggcgccaccacatgcacggaggacagaatccaacacgctctggaacggtgtctccatgggctgagcctttcccgcagatctaccagctggtccgccggactgtgcctcaactgttggtctctgcaggagcttgtgagccgggatcctggccacttcctgattctcctggaacagatcctgcagaagacacgcgaggtccaagaaaaagggacctacgacctcctgacaccgcttgcgctgctcttttattccaccgttctgtgcacaccccatttccctcccgattctgaccttctgctcaaggctgccagcacctaccacagatttctgacgtggcctgtgccctattgttccatttgccaggagctgctcaccttcatcgatgccgagctgaaagctcctggaattagctaccagcggcttgtgcgcgccgaacagggcctgccgatcagatctcatcggtccagcacagtcaccgtgctcctgcttaatcccgttgaggtgcaagctgaatttctggccgtcgcgaacaagctctctacacctgggcacagcccccacagcgcctataccacgctgctgctccatgctttccaggccacatttggagctcactgtgacgtgcctggcctgcattgccgccttcaggccaaaaccctggcggagctcgaggatatcttcacagaaaccgccgaggctcaggaactggcctctggcattggggacgctgccgaggccagacggtggcttcgcaccaagctgcaagctgttggagaaaaggcgggctttcccggggtgctcgatacagccaaaccgggaaagctgcacacgatccctattcccgtcgctagatgttacacctattcctggagccaggactccttcgatatcctgcaggagattctcctgaaagagcaagaacttctgcagcctggcatcctcggggacgatgaggaagaggaagaggaggaagaggaagtggaggaagacctggagacagacggacactgcgccgagcgggattctctgcttagcacctccagcctcgcctctcatgactccacactgagcctggcttctagccaggcctccggccccgcgctctctcgccatctgcttaccagctttgtgtccggcctgagcgatgggatggactctggatacgtcgaagattccgaggaatcctcttccgagtggccctggagacggggcagccaggagagacgcgggcaccggagacctggacaaaagttcattcgcatctacaaactctttaagtccacgtctcagctggttctgcggagagacagccgctcccttgaaggctctagcgatacagctctcccgctgcggagagccgggtccctgtgtagccccctcgacgagcctgtgtctcccccttcccgcgcccagcggagcagatctctgccccagccgaaacttggaacccaactgccttcctggctcctggctcccgccagccgccctcagcggagacggcccttcctgtctggcgatgaagaccctaaggctagcacccttcgcgtggtcgtgttcggctccgatagaatcagcgggaaggttgcccgggcgtattctaatctcagacgcctggagaacaatcggcccctgctcacaagatttttcaaactgcagtttttctacgtgccggtcaagcgctcccacggaaccagccctggcgcctgccctccgcccagatcccagacaccctctccccctacggacagcccccggcatgcttcccctggggaacttggaaccacaccctgggaggagtctaccaacgacattagccactatctgggcatgctcgatccttggtacgaacgcaatgtgctggggctgatgcaccttcccccggaggttctctgccaacagtccctgaaagccgaagctcaggccctggagggctctcctacacagctccccatcctggcggacatgcttctgtattactgtagatttgccgctcggcctgtgctcctgcaagtctatcagaccgaactgacgttcattaccggagagaagacaaccgagatctttattcatagccttgaactgggccactccgccgctacacgcgccatcaaagccagcgggcccggatctaagagactcggcatcgatggggaccgggaggctgtgccgctgaccctccagattatctactccaagggagcgattagcggccgctctagatggtccaacctggaaaaagtctgcacgagcgtgaatcttaacaaggcctgtcggaaacaagaggaactggattcttccatggaggctctcacactgaatctgaccgaggttgtgaagcgccagaacagcaaatccaagaaggggttcaatcagatcagcacatctcagattaaagtcgacaaggtgcaaatcatcggcagcaactcctgcccttttgccgtttgtcttgatcaggacgaaagaaaaattctgcagtctgtggtccggtgcgaggtgagcccctgttacaagcctgaaaaatccgatctctctagccctccccagaccccgcccgacctgcccgcccaagctgcccctgatctctgctccctgctttgtctgcccatcatgaccttctctggagcgctcccttga

SEQ ID NO: 9249 - protein, 968 aa, synthetic construct
  REGION 1..968: note = PKD2__Homo_sapiens__Q13563
MVNSSRVQPQQPGDAKRPPAPRAPDPGRLMAGCAAVGASLAAPGGLCEQRGLEIEMQRIRQAAARDPPAGAAASPSPPLSSCSRQAWSRDNPGFEAEEEEEEVEGEEGGMVVEMDVEWRPGSRRSAASSAVSSVGARSRGLGGYHGAGHPSGRRRRREDQGPPCPSPVGGGDPLHRHLPLEGQPPRVAWAERLVRGLRGLWGTRLMEESSTNREKYLKSVLRELVTYLLFLIVLCILTYGMMSSNVYYYTRMMSQLFLDTPVSKTEKTNFKTLSSMEDFWKFTEGSLLDGLYWKMQPSNQTEADNRSFIFYENLLLGVPRIRQLRVRNGSCSIPQDLRDEIKECYDVYSVSSEDRAPFGPRNGTAWIYTSEKDLNGSSHWGIIATYSGAGYYLDLSRTREETAAQVASLKKNVWLDRGTRATFIDFSVYNANINLFCVVRLLVEFPATGGVIPSWQFQPLKLIRYVTTFDFFLAACEIIFCFFIFYYVVEEILEIRIHKLHYFRSFWNCLDVVIVVLSVVAIGINIYRTSNVEVLLQFLEDQNTFPNFEHLAYWQIQFNNIAAVTVFFVWIKLFKFINFNRTMSQLSTTMSRCAKDLFGFAIMFFIIFLAYAQLAYLVFGTQVDDFSTFQECIFTQFRIILGDINFAEIEEANRVLGPIYFTTFVFFMFFILLNMFLAIINDTYSEVKSDLAQQKAEMELSDLIRKGYHKALVKLKLKKNTVDDISESLRQGGGKLNFDELRQDLKGKGHTDAEIEAIFTKYDQDGDQELTEHEHQQMRDDLEKEREDLDLDHSSLPRPMSSRSFPRSLDDSEEDDDEDSGHSSRRRGSISSGVSYEEFQVLVRRVDRMEHSIGSIVSKIDAVIVKLEIMERAKLKRREVLGRLLDGVAEDERLGRDSEIHREQMERLVREELERWESDDAASQISHGLGTPVGLNGQPRPRSSRPSSSQSTEGMEGAGGNGSSNVHV

SEQ ID NO: 9250 - RNA, 2907 nt, synthetic construct
  misc_feature 1..2907: note = PKD2__Homo_sapiens__AAC50520
  source 1..2907: mol_type = other RNA
atggtgaactccagtcgcgtgcagcctcagcagcccggggacgccaagcggccgcccgcgccccgcgcgccggacccgggccggctgatggctggctgcgcggccgtgggcgccagcctcgccgccccgggcggcctctgcgagcagcggggcctggagatcgagatgcagcgcatccggcaggcggccgcgcgggaccccccggccggagccgcggcctccccttctcctccgctctcgtcgtgctcccggcaggcgtggagccgcgataaccccggcttcgaggccgaggaggaggaggaggaggtggaaggggaagaaggcggaatggtggtggagatggacgtagagtggcgcccgggcagccggaggtcggccgcctcctcggccgtgagctccgtgggcgcgcggagccgggggcttgggggctaccacggcgcgggccacccgagcgggaggcggcgccggcgagaggaccagggcccgccgtgccccagcccagtcggcggcggggacccgctgcatcgccacctccccctggaagggcagccgccccgagtggcctgggcggagaggctggttcgcgggctgcgaggtctctggggaacaagactcatggaggaaagcagcactaaccgagagaaataccttaaaagtgttttacgggaactggtcacatacctcctttttctcatagtcttgtgcatcttgacctacggcatgatgagctccaatgtgtactactacacccggatgatgtcacagctcttcctagacacccccgtgtccaaaacggagaaaactaactttaaaactctgtcttccatggaagacttctggaagttcacagaaggctccttattggatgggctgtactggaagatgcagcccagcaaccagactgaagctgacaaccgaagtttcatcttctatgagaacctgctgttaggggttccacgaatacggcaactccgagtcagaaatggatcctgctctatcccccaggacttgagagatgaaattaaagagtgctatgatgtctactctgtcagtagtgaagatagggctccctttgggccccgaaatggaaccgcttggatctacacaagtgaaaaagacttgaatggtagtagccactggggaatcattgcaacttatagtggagctggctattatctggatttgtcaagaacaagagaggaaacagctgcacaagttgctagcctcaagaaaaatgtctggctggaccgaggaaccagggcaacttttattgacttctcagtgtacaacgccaacattaacctgttctgtgtggtcaggttattggttgaattcccagcaacaggtggtgtgattccatcttggcaatttcagcctttaaagctgatccgatatgtcacaacttttgatttcttcctggcagcctgtgagattatcttttgtttctttatcttttactatgtggtggaagagatattggaaattcgcattcacaaactacactatttcaggagtttctggaattgtctggatgttgtgatcgttgtgctgtcagtggtagctataggaattaacatatacagaacatcaaatgtggaggtgctactacagtttctggaagatcaaaatactttccccaactttgagcatctggcatattggcagatacagttcaacaatatagctgctgtcacagtattttttgtctggattaagctcttcaaattcatcaattttaacaggaccatgagccagctctcgacaaccatgtctcgatgtgccaaagacctgtttggctttgctattatgttcttcattattttcctagcgtatgctcagttggcataccttgtctttggcactcaggtcgatgacttcagtactttccaagagtgtatcttcactcaattccgtatcattttgggcgatatcaactttgcagagattgaggaagctaatcgagttttgggaccaatttatttcactacatttgtgttctttatgttcttcattcttttgaatatgtttttggctatcatcaatgatacttactctgaagtgaaatctgacttggcacagcagaaagctgaaatggaactctcagatcttatcagaaagggctaccataaagctttggtcaaactaaaactgaaaaaaaataccgtggatgacatttcagagagtctgcggcaaggaggaggcaagttaaactttgacgaacttcgacaagatctcaaagggaagggccatactgatgcagagattgaggcaatattcacaaagtacgaccaagatggagaccaagaactgaccgaacatgaacatcagcagatgagagacgacttggagaaagagagggaggacctggatttggatcacagttctttaccacgtcccatgagcagccgaagtttccctcgaagcctggatgactctgaggaggatgacgatgaagatagcggacatagctccagaaggaggggaagcatttctagtggcgtttcttacgaagagtttcaagtcctggtgagacgagtggaccggatggagcattccatcggcagcatagtgtccaagattgacgccgtgatcgtgaagctagagattatggagcgagccaaactgaagaggagggaggtgctgggaaggctgttggatggggtggccgaggatgaaaggctgggtcgtgacagtgaaatccatagggaacagatggaacggctagtacgtgaagagttggaacgctgggaatccgatgatgcagcttcccagatcagtcatggtttaggcacgccagtgggactaaatggtcaacctcgccccagaagctcccgcccatcttcctcccaatctacagaaggcatggaaggtgcaggtggaaatgggagttctaatgtccacgtatga

SEQ ID NO: 9251 - RNA, 2907 nt, synthetic construct
  misc_feature 1..2907: note = derived and/or modified sequence opt1 fromPKD2__Homo_sapiens__AAC50520
  source 1..2907: mol_type = other RNA
atggtgaacagctcccgcgtccagccccagcagccgggcgacgccaagcggccgcccgcgccccgcgcgcccgaccccgggcggctgatggccggctgcgccgccgtgggggccagcctcgcggcccccggcgggctgtgcgagcagcgcggcctggagatcgagatgcagcggatccgccaggccgccgcgcgggacccgcccgccggcgccgccgcctcccccagcccgcccctgtccagctgctcccgccaggcgtggagccgggacaaccccgggttcgaggccgaggaggaggaggaggaggtggagggcgaggagggcgggatggtcgtggagatggacgtggagtggcgccccgggtcccggcgcagcgccgcctccagcgccgtctccagcgtgggcgcgcggtcccgcggcctcgggggctaccacggggccggccaccccagcggccggcgccggcgccgggaggaccaggggcccccgtgcccctcccccgtgggcgggggcgaccccctgcaccgccacctcccgctggaggggcagccgccccgggtcgcctgggccgagcgcctggtgcgcggcctccggggcctgtgggggacccgcctgatggaggagagctccaccaaccgggagaagtacctcaagagcgtgctgcgcgagctggtcacgtacctcctgttcctgatcgtgctctgcatcctgacctacggcatgatgagctccaacgtgtactactacacccggatgatgagccagctgttcctcgacacccccgtctccaagacggagaagaccaacttcaagaccctgagctccatggaggacttctggaagttcaccgaggggagcctgctcgacggcctgtactggaagatgcagccctccaaccagacggaggccgacaaccgcagcttcatcttctacgagaacctgctcctgggggtgccccggatccgccagctgcgggtgcgcaacggctcctgcagcatcccccaggacctccgggacgagatcaaggagtgctacgacgtctactccgtgagctccgaggaccgcgcgcccttcggcccgcggaacgggaccgcctggatctacaccagcgagaaggacctgaacggctccagccactgggggatcatcgccacctactccggcgccgggtactacctggacctcagccgcacgcgggaggagaccgccgcccaggtggcctccctgaagaagaacgtctggctggaccgcggcacccgggccaccttcatcgacttcagcgtgtacaacgccaacatcaacctcttctgcgtggtccgcctgctggtggagttccccgcgacgggcggggtcatccccagctggcagttccagccgctcaagctgatccggtacgtgaccaccttcgacttcttcctggccgcctgcgagatcatcttctgcttcttcatcttctactacgtggtcgaggagatcctcgagatccgcatccacaagctgcactacttccgctccttctggaactgcctggacgtggtgatcgtcgtgctcagcgtggtcgccatcggcatcaacatctaccggacctccaacgtggaggtgctgctgcagttcctcgaggaccagaacacgttccccaacttcgagcacctggcctactggcagatccagttcaacaacatcgcggccgtcaccgtgttcttcgtgtggatcaagctgttcaagttcatcaacttcaaccgcaccatgagccagctgtccaccacgatgagccggtgcgccaaggacctcttcgggttcgccatcatgttcttcatcatcttcctggcctacgcgcagctggcctacctcgtcttcggcacccaggtggacgacttctccaccttccaggagtgcatcttcacccagttccgcatcatcctgggcgacatcaacttcgccgagatcgaggaggccaaccgggtgctggggcccatctacttcacgaccttcgtcttcttcatgttcttcatcctcctgaacatgttcctggccatcatcaacgacacctacagcgaggtgaagtccgacctcgcgcagcagaaggccgagatggagctgagcgacctgatccgcaagggctaccacaaggccctcgtgaagctgaagctgaagaagaacaccgtcgacgacatctccgagagcctccggcagggcggcgggaagctgaacttcgacgagctgcgccaggacctcaaggggaagggccacacggacgccgagatcgaggcgatcttcaccaagtacgaccaggacggggaccaggagctgaccgagcacgagcaccagcagatgcgggacgacctggagaaggagcgcgaggacctcgacctggaccactccagcctgccccggccgatgtccagccgctccttcccccggagcctcgacgacagcgaggaggacgacgacgaggactccggccacagctcccgccggcgcgggagcatctccagcggcgtgtcctacgaggagttccaggtgctggtccggcgcgtggaccggatggagcacagcatcgggtccatcgtgagcaagatcgacgccgtcatcgtgaagctggagatcatggagcgcgccaagctcaagcggcgcgaggtgctgggccgcctgctcgacggcgtcgccgaggacgagcggctggggcgcgactccgagatccaccgggagcagatggagcgcctggtgcgggaggagctcgagcgctgggagagcgacgacgccgcgtcccagatcagccacggcctggggacccccgtgggcctgaacgggcagccccggccgcgctccagccggccctccagctcccagagcacggagggcatggagggcgccgggggcaacgggagctccaacgtccacgtgtga

SEQ ID NO: 9252 - RNA, 2907 nt, synthetic construct
  misc_feature 1..2907: note = derived and/or modified sequence opt2 fromPKD2__Homo_sapiens__AAC50520
  source 1..2907: mol_type = other RNA
atggtcaactcctcccgcgtccagccccagcagcccggcgacgccaagcgcccccccgccccccgcgcccccgaccccggccgcctcatggccggctgcgccgccgtcggcgcctccctcgccgcccccggcggcctctgcgagcagcgcggcctcgagatcgagatgcagcgcatccgccaggccgccgcccgcgacccccccgccggcgccgccgcctccccctccccccccctctcctcctgctcccgccaggcctggtcccgcgacaaccccggcttcgaggccgaggaggaggaggaggaggtcgagggcgaggagggcggcatggtcgtcgagatggacgtcgagtggcgccccggctcccgccgctccgccgcctcctccgccgtctcctccgtcggcgcccgctcccgcggcctcggcggctaccacggcgccggccacccctccggccgccgccgccgccgcgaggaccagggccccccctgcccctcccccgtcggcggcggcgaccccctccaccgccacctccccctcgagggccagcccccccgcgtcgcctgggccgagcgcctcgtccgcggcctccgcggcctctggggcacccgcctcatggaggagtcctccaccaaccgcgagaagtacctcaagtccgtcctccgcgagctcgtcacctacctcctcttcctcatcgtcctctgcatcctcacctacggcatgatgtcctccaacgtctactactacacccgcatgatgtcccagctcttcctcgacacccccgtctccaagaccgagaagaccaacttcaagaccctctcctccatggaggacttctggaagttcaccgagggctccctcctcgacggcctctactggaagatgcagccctccaaccagaccgaggccgacaaccgctccttcatcttctacgagaacctcctcctcggcgtcccccgcatccgccagctccgcgtccgcaacggctcctgctccatcccccaggacctccgcgacgagatcaaggagtgctacgacgtctactccgtctcctccgaggaccgcgcccccttcggcccccgcaacggcaccgcctggatctacacctccgagaaggacctcaacggctcctcccactggggcatcatcgccacctactccggcgccggctactacctcgacctctcccgcacccgcgaggagaccgccgcccaggtcgcctccctcaagaagaacgtctggctcgaccgcggcacccgcgccaccttcatcgacttctccgtctacaacgccaacatcaacctcttctgcgtcgtccgcctcctcgtcgagttccccgccaccggcggcgtcatcccctcctggcagttccagcccctcaagctcatccgctacgtcaccaccttcgacttcttcctcgccgcctgcgagatcatcttctgcttcttcatcttctactacgtcgtcgaggagatcctcgagatccgcatccacaagctccactacttccgctccttctggaactgcctcgacgtcgtcatcgtcgtcctctccgtcgtcgccatcggcatcaacatctaccgcacctccaacgtcgaggtcctcctccagttcctcgaggaccagaacaccttccccaacttcgagcacctcgcctactggcagatccagttcaacaacatcgccgccgtcaccgtcttcttcgtctggatcaagctcttcaagttcatcaacttcaaccgcaccatgtcccagctctccaccaccatgtcccgctgcgccaaggacctcttcggcttcgccatcatgttcttcatcatcttcctcgcctacgcccagctcgcctacctcgtcttcggcacccaggtcgacgacttctccaccttccaggagtgcatcttcacccagttccgcatcatcctcggcgacatcaacttcgccgagatcgaggaggccaaccgcgtcctcggccccatctacttcaccaccttcgtcttcttcatgttcttcatcctcctcaacatgttcctcgccatcatcaacgacacctactccgaggtcaagtccgacctcgcccagcagaaggccgagatggagctctccgacctcatccgcaagggctaccacaaggccctcgtcaagctcaagctcaagaagaacaccgtcgacgacatctccgagtccctccgccagggcggcggcaagctcaacttcgacgagctccgccaggacctcaagggcaagggccacaccgacgccgagatcgaggccatcttcaccaagtacgaccaggacggcgaccaggagctcaccgagcacgagcaccagcagatgcgcgacgacctcgagaaggagcgcgaggacctcgacctcgaccactcctccctcccccgccccatgtcctcccgctccttcccccgctccctcgacgactccgaggaggacgacgacgaggactccggccactcctcccgccgccgcggctccatctcctccggcgtctcctacgaggagttccaggtcctcgtccgccgcgtcgaccgcatggagcactccatcggctccatcgtctccaagatcgacgccgtcatcgtcaagctcgagatcatggagcgcgccaagctcaagcgccgcgaggtcctcggccgcctcctcgacggcgtcgccgaggacgagcgcctcggccgcgactccgagatccaccgcgagcagatggagcgcctcgtccgcgaggagctcgagcgctgggagtccgacgacgccgcctcccagatctcccacggcctcggcacccccgtcggcctcaacggccagccccgcccccgctcctcccgcccctcctcctcccagtccaccgagggcatggagggcgccggcggcaacggctcctccaacgtccacgtctga

SEQ ID NO: 9253 - RNA, 2907 nt, synthetic construct
  misc_feature 1..2907: note = derived and/or modified sequence opt3 fromPKD2__Homo_sapiens__AAC50520
  source 1..2907: mol_type = other RNA
atggtgaacagctccagagtccagccccaacagcctggcgacgccaagaggccaccggctccccgggcacctgatccagggcgcctgatggccggatgcgcggctgttggtgcctctctcgcagcccccggcgggctttgtgagcagcgaggactggaaatcgagatgcagcgtattagacaagctgcagccagggaccctccagctggcgccgcggcatcacccagtcctccattgagctcctgctctcggcaggcctggtcgcgcgataatccgggtttcgaagctgaggaagaggaggaagaggtggaaggggaggagggaggcatggtagtggaaatggacgtcgagtggagacccggctcaaggcggagcgccgcaagttccgctgtgtctagcgttggggcccgctcccgaggattaggtggctaccacggggcgggacatccttcaggcagaaggcggcgtcgcgaagatcagggtccaccctgtcctagtccagtcgggggaggcgaccccctgcacagacatctaccgctcgagggccagcctcccagggtggcctgggcagaacggctggtgcgagggcttcgcggactgtggggtaccagattgatggaggagagctctacaaacagggaaaaatatctcaagtccgtactgcgggagctggttacttacctcttatttctgatagtgctttgcatcttgacgtatggcatgatgtcaagcaatgtctactattacacccgcatgatgagtcaactgttcctagatacaccagtgtctaaaactgaaaagaccaactttaaaacactctccagcatggaggacttctggaagtttaccgaagggtcgctgcttgatggactgtattggaagatgcagccttctaatcagactgaggctgacaacagatccttcattttctacgagaatttgctcctgggcgtgcccaggatccgtcagttacgggtccgaaacggttcatgtagtattccacaagatctgagagacgaaatcaaagagtgctacgatgtttatagcgtgtcctctgaagacagggcccccttcgggcctcgcaatggcacagcttggatatacaccagcgagaaggacctcaacggatcaagtcactggggcatcattgccacgtattccggggcaggatactatcttgatctgagccggactagagaagagaccgccgctcaggtagcgtctttgaaaaagaatgtgtggctagacaggggtacacgcgcaacttttatcgatttctcagtctacaacgccaatattaacctgttttgtgtggttcgactcctggtggagttcccagctaccggcggggtcatcccgagttggcagtttcaaccccttaaactgatacggtatgtgacaaccttcgacttctttttggccgcatgcgaaattatcttctgctttttcatcttttactacgtagttgaggaaattctcgagatccgtattcataagctgcactatttcaggagcttttggaattgtttagatgtggtcatagtggtcctgtccgtggttgccatcggaattaacatctacagaacgtctaacgtggaggtactactccagttcctggaagaccagaatacttttcctaacttcgagcaccttgcttattggcagatacaatttaataacattgccgcagtcacagtgttctttgtttggatcaagttgttcaaattcatcaattttaaccgcaccatgtcgcagctgagcactacaatgtcccggtgtgcgaaggatctcttcggctttgctattatgttctttatcattttcctggcctacgcacagcttgcctatctggtgtttggtacccaggtcgacgatttctcaacgtttcaagaatgcatattcacccagtttagaatcattttgggggacatcaatttcgctgagatcgaagaggccaacagggtgctcggcccaatttactttacaactttcgtattctttatgttctttatactgttaaatatgttcctggcaatcattaacgatacctatagtgaggtgaaatctgacctagctcagcagaaggccgaaatggagctcagcgacctgatccgaaaaggataccataaggcgcttgttaaattgaagctgaagaaaaatacagtcgatgacatttccgaatcactccgccaaggcgggggaaagctgaactttgatgagttacggcaggacctgaaaggtaagggccacactgatgccgaaatcgaggctatattcaccaaatacgaccaggatggggaccaggagcttacagaacatgagcaccaacagatgagagatgacttggaaaaggagagggaagatctcgacctggatcacagctctctaccccgtcctatgtccagtcgcagctttccacggtctctggacgactccgaggaggatgacgatgaagactcaggacatagtagcagaaggcgaggctcgatctcctctggtgtgagctatgaggaatttcaggtgctcgtccggcgcgttgatagaatggagcactcaattgggagtatcgtgtccaagattgacgcagtgatcgtaaaactggagataatggaaagggccaaacttaagcggcgagaggtcttgggcagactgttagatggagtggctgaagacgagcgcctcggcagggattctgaaattcatcgtgagcaaatggagcggctggttagagaggaacttgaaaggtgggagagcgacgatgccgcatcccagatctcacacgggctgggaacccccgtgggcttgaatggtcagccgcgccctcgaagcagtagaccatcttccagccagtcgactgaagggatggagggagcgggcggtaacggctcatctaatgtccatgtgtga

SEQ ID NO: 9254 - RNA, 2907 nt, synthetic construct
  misc_feature 1..2907: note = derived and/or modified sequence opt4 fromPKD2__Homo_sapiens__AAC50520
  source 1..2907: mol_type = other RNA
atggtgaacagcagcagagtgcagccccagcagcccggcgacgccaagagaccccccgcccccagagcccccgaccccggcagactgatggccggctgcgccgccgtgggcgccagcctggccgcccccggcggcctgtgcgagcagagaggcctggagatcgagatgcagagaatcagacaggccgccgccagagacccccccgccggcgccgccgccagccccagcccccccctgagcagctgcagcagacaggcctggagcagagacaaccccggcttcgaggccgaggaggaggaggaggaggtggagggcgaggagggcggcatggtggtggagatggacgtggagtggagacccggcagcagaagaagcgccgccagcagcgccgtgagcagcgtgggcgccagaagcagaggcctgggcggctaccacggcgccggccaccccagcggcagaagaagaagaagagaggaccagggccccccctgccccagccccgtgggcggcggcgaccccctgcacagacacctgcccctggagggccagccccccagagtggcctgggccgagagactggtgagaggcctgagaggcctgtggggcaccagactgatggaggagagcagcaccaacagagagaagtacctgaagagcgtgctgagagagctggtgacctacctgctgttcctgatcgtgctgtgcatcctgacctacggcatgatgagcagcaacgtgtactactacaccagaatgatgagccagctgttcctggacacccccgtgagcaagaccgagaagaccaacttcaagaccctgagcagcatggaggacttctggaagttcaccgagggcagcctgctggacggcctgtactggaagatgcagcccagcaaccagaccgaggccgacaacagaagcttcatcttctacgagaacctgctgctgggcgtgcccagaatcagacagctgagagtgagaaacggcagctgcagcatcccccaggacctgagagacgagatcaaggagtgctacgacgtgtacagcgtgagcagcgaggacagagcccccttcggccccagaaacggcaccgcctggatctacaccagcgagaaggacctgaacggcagcagccactggggcatcatcgccacctacagcggcgccggctactacctggacctgagcagaaccagagaggagaccgccgcccaggtggccagcctgaagaagaacgtgtggctggacagaggcaccagagccaccttcatcgacttcagcgtgtacaacgccaacatcaacctgttctgcgtggtgagactgctggtggagttccccgccaccggcggcgtgatccccagctggcagttccagcccctgaagctgatcagatacgtgaccaccttcgacttcttcctggccgcctgcgagatcatcttctgcttcttcatcttctactacgtggtggaggagatcctggagatcagaatccacaagctgcactacttcagaagcttctggaactgcctggacgtggtgatcgtggtgctgagcgtggtggccatcggcatcaacatctacagaaccagcaacgtggaggtgctgctgcagttcctggaggaccagaacaccttccccaacttcgagcacctggcctactggcagatccagttcaacaacatcgccgccgtgaccgtgttcttcgtgtggatcaagctgttcaagttcatcaacttcaacagaaccatgagccagctgagcaccaccatgagcagatgcgccaaggacctgttcggcttcgccatcatgttcttcatcatcttcctggcctacgcccagctggcctacctggtgttcggcacccaggtggacgacttcagcaccttccaggagtgcatcttcacccagttcagaatcatcctgggcgacatcaacttcgccgagatcgaggaggccaacagagtgctgggccccatctacttcaccaccttcgtgttcttcatgttcttcatcctgctgaacatgttcctggccatcatcaacgacacctacagcgaggtgaagagcgacctggcccagcagaaggccgagatggagctgagcgacctgatcagaaagggctaccacaaggccctggtgaagctgaagctgaagaagaacaccgtggacgacatcagcgagagcctgagacagggcggcggcaagctgaacttcgacgagctgagacaggacctgaagggcaagggccacaccgacgccgagatcgaggccatcttcaccaagtacgaccaggacggcgaccaggagctgaccgagcacgagcaccagcagatgagagacgacctggagaaggagagagaggacctggacctggaccacagcagcctgcccagacccatgagcagcagaagcttccccagaagcctggacgacagcgaggaggacgacgacgaggacagcggccacagcagcagaagaagaggcagcatcagcagcggcgtgagctacgaggagttccaggtgctggtgagaagagtggacagaatggagcacagcatcggcagcatcgtgagcaagatcgacgccgtgatcgtgaagctggagatcatggagagagccaagctgaagagaagagaggtgctgggcagactgctggacggcgtggccgaggacgagagactgggcagagacagcgagatccacagagagcagatggagagactggtgagagaggagctggagagatgggagagcgacgacgccgccagccagatcagccacggcctgggcacccccgtgggcctgaacggccagcccagacccagaagcagcagacccagcagcagccagagcaccgagggcatggagggcgccggcggcaacggcagcagcaacgtgcacgtgtga

SEQ ID NO: 9255 - RNA, 2907 nt, synthetic construct
  misc_feature 1..2907: note = derived and/or modified sequence opt5 fromPKD2__Homo_sapiens__AAC50520
  source 1..2907: mol_type = other RNA
atggtgaacagctccagagtccagccccaacagcctggcgacgccaagcggccgcccgctcctcgcgcccccgatcctgggagactgatggcgggatgcgctgccgttggcgcctctctcgctgcccccgggggactgtgtgagcagcggggccttgaaatcgagatgcagcgcattagacaagctgccgcgcgggaccctccggccggggctgccgctagcccctcccctcccctgtctagctgctcccgccaggcctggtctagagataatcctggattcgaagcggaggaagaggaggaagaggtggaaggcgaggagggcgggatggtggtcgaaatggacgtggagtggcggcccggaagccgcagatccgccgctagctctgccgtttccagcgtgggcgctcggtctcgcgggctcggaggctaccacggggccggacatccgtccggcagacggcgcagacgggaagatcagggccctccctgtcctagccccgtcgggggaggcgaccccctgcacagacatcttcctctggaggggcagccgccccgcgtggcctgggctgaacggctcgttagaggactgcgcggcctgtgggggacccggctcatggaggagtcttccacaaacagagaaaaatatcttaagagcgtgcttcgcgagctggtcacgtacctcctgtttcttatcgtgctgtgcattctcacctatggaatgatgtcctctaatgtgtactattacacacggatgatgagccaactgttcctggatacccctgtctccaaaacagaaaagaccaactttaaaacactcagctctatggaggacttctggaagtttaccgaaggctccctgcttgatggcctgtattggaagatgcagcccagcaatcagacggaggcggacaacagatctttcatcttttacgagaatctcctgcttggggttcctcgcattcggcagctgagagtgcgcaacggaagctgttccatcccccaagatctccgggacgaaatcaaagagtgctacgatgtgtattctgtcagctccgaagacagagccccgttcggccctcggaatgggaccgcttggatttacacaagcgagaaggacctgaacggatcttcccactggggcatcattgccacctatagcggggccggctactatctggatctctctcgcacaagagaagagaccgctgcccaggtggcgtccctgaaaaagaatgtttggcttgaccggggaacgagagctacatttatcgatttcagcgtgtacaacgccaatattaacctgttttgtgtcgtgcgcctcctggttgagttccccgccaccggcggggtgatcccttcctggcagtttcaaccccttaaactgattcggtatgtcacaaccttcgacttctttctcgctgcctgcgaaatcatcttctgtttcttcatcttttactacgtggtcgaggaaattctggagattagaatccataagctgcactatttccgctctttttggaattgcctcgatgtggttattgtggtcctgagcgtggttgctatcggaatcaacatttacagaacctccaacgtggaggtccttctgcagttcctcgaagaccagaatacatttcctaacttcgagcacctggcctattggcagatccaatttaataacattgcggccgtgacggtgttctttgtttggatcaagctgttcaaattcattaattttaaccggaccatgtctcagcttagcacaaccatgtcccgctgtgctaaggatctcttcggctttgccatcatgttctttatcattttcctggcttacgcccagctggcgtatctcgtctttgggacacaggtggacgatttcagcacctttcaagaatgcatcttcacgcagtttagaattatcctgggagacattaatttcgccgagatcgaagaggctaaccgggtgcttggccccatttactttacaaccttcgtcttctttatgttctttatcctgctcaatatgttcctggccatcattaacgatacctattctgaggtgaaatccgacctggctcagcagaaggccgaaatggagcttagcgacctcatccgcaaagggtaccataaggccctggttaaactgaagctcaagaaaaatacagtggatgacatttctgaatccctgagacaaggcggaggcaagctgaactttgatgagctgcggcaggacctcaaagggaagggacacaccgatgctgaaatcgaggcgattttcacaaaatacgaccaggatggcgaccaggagctgacggaacatgagcaccaacagatgcgcgatgacctggaaaaggagagagaagatcttgacctcgatcacagctctctgccgcggcctatgagctcccgcagctttcccagatctctggacgactccgaggaggatgacgatgaagacagcgggcattcctctcggagacgcggaagcatctcctctggcgtcagctatgaggaatttcaggtgctcgttcggagagtggatcgcatggagcactccatcgggtctattgtcagcaagatcgacgccgtgattgttaaactggagatcatggaacgggctaaacttaagagacgcgaggtgctgggccggctcctggatggagtcgccgaagacgagagactgggccgcgattccgaaattcatcgggagcaaatggagagacttgtgcgggaggaactcgaacgctgggagagcgacgatgccgcttctcagatctcccacgggctgggaacccccgtgggcctgaatgggcagcctagaccgcggagctctcgcccctccagctctcagtccacagaaggaatggagggcgccgggggcaacggaagctccaatgtccatgtttga

SEQ ID NO: 9256 - protein, 942 aa, synthetic construct
  REGION 1..942: note = PKN1__Homo_sapiens__Q16512
MASDAVQSEPRSWSLLEQLGLAGADLAAPGVQQQLELERERLRREIRKELKLKEGAENLRRATTDLGRSLGPVELLLRGSSRRLDLLHQQLQELHAHVVLPDPAATHDGPQSPGAGGPTCSATNLSRVAGLEKQLAIELKVKQGAENMIQTYSNGSTKDRKLLLTAQQMLQDSKTKIDIIRMQLRRALQAGQLENQAAPDDTQGSPDLGAVELRIEELRHHFRVEHAVAEGAKNVLRLLSAAKAPDRKAVSEAQEKLTESNQKLGLLREALERRLGELPADHPKGRLLREELAAASSAAFSTRLAGPFPATHYSTLCKPAPLTGTLEVRVVGCRDLPETIPWNPTPSMGGPGTPDSRPPFLSRPARGLYSRSGSLSGRSSLKAEAENTSEVSTVLKLDNTVVGQTSWKPCGPNAWDQSFTLELERARELELAVFWRDQRGLCALKFLKLEDFLDNERHEVQLDMEPQGCLVAEVTFRNPVIERIPRLRRQKKIFSKQQGKAFQRARQMNIDVATWVRLLRRLIPNATGTGTFSPGASPGSEARTTGDISVEKLNLGTDSDSSPQKSSRDPPSSPSSLSSPIQESTAPELPSETQETPGPALCSPLRKSPLTLEDFKFLAVLGRGHFGKVLLSEFRPSGELFAIKALKKGDIVARDEVESLMCEKRILAAVTSAGHPFLVNLFGCFQTPEHVCFVMEYSAGGDLMLHIHSDVFSEPRAIFYSACVVLGLQFLHEHKIVYRDLKLDNLLLDTEGYVKIADFGLCKEGMGYGDRTSTFCGTPEFLAPEVLTDTSYTRAVDWWGLGVLLYEMLVGESPFPGDDEEEVFDSIVNDEVRYPRFLSAEAIGIMRRLLRRNPERRLGSSERDAEDVKKQPFFRTLGWEALLARRLPPPFVPTLSGRTDVSNFDEEFTGEAPTLSPPRDARPLTAAEQAAFLDFDFVAGGC

SEQ ID NO: 9257 - RNA, 2829 nt, synthetic construct
  misc_feature 1..2829: note = PKN1__Homo_sapiens__BAA05169
  source 1..2829: mol_type = other RNA
atggccagcgacgccgtgcagagtgagcctcgcagctggtccctgctagagcagctgggcctggccggggcagacctggcggcccccggggtacagcagcagctggagctggagcgggagcggctgcggcgggaaatccgcaaggagctgaagctgaaggagggtgctgagaacctgcggcgggccaccactgacctgggccgcagcctgggccccgtagagctgctgctgcggggctcctcgcgccgcctcgacctgctgcaccagcagctgcaggagctgcacgcccacgtggtgcttcccgacccggcggccacccacgatggcccccagtcccctggtgcgggtggccccacctgctcggccaccaacctgagccgcgtggcgggcctggagaagcagttggccattgagctgaaggtgaagcagggggcggagaacatgatccagacctacagcaatggcagcaccaaggaccggaagctgctgctgacagcccagcagatgttgcaggacagtaagaccaagattgacatcatccgcatgcaactccgccgggcgctgcaggccggccagctggagaaccaggcagccccggatgacacccaagggagtcctgacctgggggctgtggagctgcgcatcgaagagctgcggcaccacttccgagtggagcacgcggtggccgagggtgccaagaacgtactgcgcctgctcagcgctgccaaggccccggaccgcaaggcagtcagcgaggcccaggagaaattgacagaatccaaccagaagctggggctgctgcgggaggctctggagcggagacttggggagctgcccgccgaccaccccaaggggcggctgctgcgagaagagctcgctgcggcctcctccgctgccttcagcacccgcctggccgggccctttcccgccacgcactacagcaccctgtgcaagcccgcgccgctcacagggaccctggaggtacgagtggtgggctgcagagacctcccagagaccatcccgtggaaccctaccccctcaatggggggacctgggaccccagacagccgcccccccttcctgagccgcccagcccggggcctttacagccgaagcggaagcctcagtggccggagcagcctcaaagcagaagccgagaacaccagtgaagtcagcactgtgcttaagctggataacacagtggtggggcagacgtcttggaagccatgtggccccaatgcctgggaccagagcttcactctggagctggaaagggcacgggaactggagttggctgtgttctggcgggaccagcggggcctgtgtgccctcaaattcctgaagttggaggatttcttggacaatgagaggcatgaggtgcagctggacatggaaccccagggctgcctggtggctgaggtcaccttccgcaaccctgtcattgagaggattcctcggctccgacggcagaagaaaattttctccaagcagcaagggaaggcgttccagcgtgctaggcagatgaacatcgatgtcgccacgtgggtgcggctgctccggaggctcatccccaatgccacgggcacaggcacctttagccctggggcttctccaggatccgaggcccggaccacgggtgacatatcggtggagaagctgaacctcggcactgactcggacagctcacctcagaagagctcgcgggatcctccttccagcccatcgagcctgagctcccccatccaggaatccactgctcccgagctgccttcggagacccaggagaccccaggccccgccctgtgcagccctctgaggaagtcacctctgaccctcgaagatttcaagttcctggcggtgctgggccggggtcattttgggaaggtgctcctctccgaattccggcccagtggggagctgttcgccatcaaggctctgaagaaaggggacattgtggcccgagacgaggtggagagcctgatgtgtgagaagcggatattggcggcagtgaccagtgcgggacaccccttcctggtgaacctcttcggctgtttccagacaccggagcacgtgtgcttcgtgatggagtactcggccggtggggacctgatgctgcacatccacagcgacgtgttctctgagccccgtgccatcttttattccgcctgcgtggtgctgggcctacagtttcttcacgaacacaagatcgtctacagggacctgaagttggacaatttgctcctggacaccgagggctacgtcaagatcgcagactttggcctctgcaaggaggggatgggctatggggaccggaccagcacattctgtgggaccccggagttcctggcccctgaggtgctgacggacacgtcgtacacgcgagctgtggactggtggggactgggtgtgctgctctacgagatgctggttggcgagtccccattcccaggggatgatgaggaggaggtcttcgacagcatcgtcaacgacgaggttcgctacccccgcttcctgtcggccgaagccatcggcatcatgagaaggctgcttcggaggaacccagagcggaggctgggatctagcgagagagatgcagaagatgtgaagaaacagcccttcttcaggactctgggctgggaagccctgttggcccggcgcctgccaccgccctttgtgcccacgctgtccggccgcaccgacgtcagcaacttcgacgaggagttcaccggggaggcccccacactgagcccgccccgcgacgcgcggccccttacagccgcggagcaggcagccttcctggacttcgacttcgtggccgggggctgctag

SEQ ID NO: 9258 - RNA, 2829 nt, synthetic construct
  misc_feature 1..2829: note = derived and/or modified sequence opt1 fromPKN1__Homo_sapiens__BAA05169
  source 1..2829: mol_type = other RNA
atggccagcgacgccgtgcagtccgagccccgcagctggtccctgctcgagcagctgggcctggcgggggccgacctcgccgccccgggcgtccagcagcagctggagctggagcgggagcgcctccggcgcgagatccggaaggagctgaagctgaaggagggggccgagaacctccgccgggcgaccaccgacctgggccgcagcctggggcccgtggagctcctgctgcggggctccagccgccggctcgacctgctgcaccagcagctccaggagctgcacgcccacgtggtcctgcccgaccccgccgccacgcacgacggcccgcagtcccccggggcgggcgggccgacctgcagcgccaccaacctctcccgcgtggccggcctggagaagcagctggccatcgagctcaaggtgaagcagggggccgagaacatgatccagacctacagcaacggctccacgaaggaccggaagctgctgctcaccgcgcagcagatgctgcaggacagcaagaccaagatcgacatcatccgcatgcagctgcggcgcgccctccaggccggccagctggagaaccaggccgcccccgacgacacccaggggtcccccgacctgggcgcggtcgagctccggatcgaggagctgcgccaccacttccgggtggagcacgccgtggccgagggggccaagaacgtcctgcgcctcctgagcgccgcgaaggcccccgaccggaaggccgtgtccgaggcccaggagaagctgacggagagcaaccagaagctcggcctgctgcgcgaggccctcgagcgccggctgggcgagctgcccgcggaccaccccaaggggcgcctcctgcgggaggagctggccgccgcctccagcgcggccttctccacccgcctcgccggcccgttccccgccacccactacagcaccctgtgcaagcccgcgcccctgacggggaccctggaggtgcgggtcgtgggctgccgcgacctcccggagaccatcccctggaaccccacccccagcatgggcgggccgggcacgcccgactcccggccgcccttcctgagccgccccgcccgggggctgtactcccgcagcggctccctcagcgggcggtccagcctgaaggccgaggccgagaacacctccgaggtgagcaccgtcctgaagctcgacaacaccgtggtgggccagacgtcctggaagccctgcgggcccaacgcctgggaccagagcttcaccctggagctggagcgcgcccgggagctcgagctggcggtcttctggcgcgaccagcggggcctgtgcgccctcaagttcctgaagctggaggacttcctcgacaacgagcgccacgaggtgcagctggacatggagccccagggctgcctggtggccgaggtcaccttccggaacccggtgatcgagcgcatcccccggctccgccgccagaagaagatcttctccaagcagcaggggaaggccttccagcgggcccgccagatgaacatcgacgtggcgacctgggtccggctgctgcgccggctcatccccaacgccacgggcaccgggaccttcagcccgggcgcctcccccgggagcgaggcccgcaccacgggcgacatctccgtggagaagctgaacctgggcaccgacagcgactccagcccccagaagtccagccgggacccgcccagctcccccagctccctcagctcccccatccaggagagcaccgcgcccgagctgccgtccgagacccaggagacgcccgggcccgccctgtgcagccccctccgcaagtccccgctgaccctggaggacttcaagttcctcgccgtcctgggccgggggcacttcggcaaggtgctgctcagcgagttccgcccctccggcgagctgttcgccatcaaggccctgaagaagggggacatcgtggcgcgggacgaggtcgagagcctcatgtgcgagaagcgcatcctggccgccgtgacctccgccggccaccccttcctggtgaacctcttcgggtgcttccagacccccgagcacgtctgcttcgtgatggagtacagcgccggcggggacctgatgctgcacatccactccgacgtgttcagcgagccgcgggcgatcttctacagcgcctgcgtcgtgctcggcctgcagttcctgcacgagcacaagatcgtgtaccgcgacctcaagctggacaacctgctcctggacacggagggctacgtcaagatcgccgacttcgggctgtgcaaggagggcatggggtacggcgaccggacctccaccttctgcgggacccccgagttcctcgcccccgaggtgctgaccgacacgagctacacccgcgccgtggactggtggggcctgggcgtcctcctgtacgagatgctggtgggggagtcccccttcccgggcgacgacgaggaggaggtgttcgacagcatcgtcaacgacgaggtgcggtacccccgcttcctctccgcggaggccatcgggatcatgcggcgcctgctgcggcgcaaccccgagcgccggctcggcagctccgagcgcgacgccgaggacgtgaagaagcagcccttcttccggaccctggggtgggaggccctgctcgcgcgccggctgccgccgcccttcgtccccaccctgagcggccgcacggacgtgtccaacttcgacgaggagttcaccggcgaggcccccaccctcagcccgccccgggacgcccgccccctgaccgccgccgagcaggcggccttcctggacttcgacttcgtggccgggggctgctga

SEQ ID NO: 9259 - RNA, 2829 nt, synthetic construct
  misc_feature 1..2829: note = derived and/or modified sequence opt2 fromPKN1__Homo_sapiens__BAA05169
  source 1..2829: mol_type = other RNA
atggcctccgacgccgtccagtccgagccccgctcctggtccctcctcgagcagctcggcctcgccggcgccgacctcgccgcccccggcgtccagcagcagctcgagctcgagcgcgagcgcctccgccgcgagatccgcaaggagctcaagctcaaggagggcgccgagaacctccgccgcgccaccaccgacctcggccgctccctcggccccgtcgagctcctcctccgcggctcctcccgccgcctcgacctcctccaccagcagctccaggagctccacgcccacgtcgtcctccccgaccccgccgccacccacgacggcccccagtcccccggcgccggcggccccacctgctccgccaccaacctctcccgcgtcgccggcctcgagaagcagctcgccatcgagctcaaggtcaagcagggcgccgagaacatgatccagacctactccaacggctccaccaaggaccgcaagctcctcctcaccgcccagcagatgctccaggactccaagaccaagatcgacatcatccgcatgcagctccgccgcgccctccaggccggccagctcgagaaccaggccgcccccgacgacacccagggctcccccgacctcggcgccgtcgagctccgcatcgaggagctccgccaccacttccgcgtcgagcacgccgtcgccgagggcgccaagaacgtcctccgcctcctctccgccgccaaggcccccgaccgcaaggccgtctccgaggcccaggagaagctcaccgagtccaaccagaagctcggcctcctccgcgaggccctcgagcgccgcctcggcgagctccccgccgaccaccccaagggccgcctcctccgcgaggagctcgccgccgcctcctccgccgccttctccacccgcctcgccggccccttccccgccacccactactccaccctctgcaagcccgcccccctcaccggcaccctcgaggtccgcgtcgtcggctgccgcgacctccccgagaccatcccctggaaccccaccccctccatgggcggccccggcacccccgactcccgcccccccttcctctcccgccccgcccgcggcctctactcccgctccggctccctctccggccgctcctccctcaaggccgaggccgagaacacctccgaggtctccaccgtcctcaagctcgacaacaccgtcgtcggccagacctcctggaagccctgcggccccaacgcctgggaccagtccttcaccctcgagctcgagcgcgcccgcgagctcgagctcgccgtcttctggcgcgaccagcgcggcctctgcgccctcaagttcctcaagctcgaggacttcctcgacaacgagcgccacgaggtccagctcgacatggagccccagggctgcctcgtcgccgaggtcaccttccgcaaccccgtcatcgagcgcatcccccgcctccgccgccagaagaagatcttctccaagcagcagggcaaggccttccagcgcgcccgccagatgaacatcgacgtcgccacctgggtccgcctcctccgccgcctcatccccaacgccaccggcaccggcaccttctcccccggcgcctcccccggctccgaggcccgcaccaccggcgacatctccgtcgagaagctcaacctcggcaccgactccgactcctccccccagaagtcctcccgcgaccccccctcctccccctcctccctctcctcccccatccaggagtccaccgcccccgagctcccctccgagacccaggagacccccggccccgccctctgctcccccctccgcaagtcccccctcaccctcgaggacttcaagttcctcgccgtcctcggccgcggccacttcggcaaggtcctcctctccgagttccgcccctccggcgagctcttcgccatcaaggccctcaagaagggcgacatcgtcgcccgcgacgaggtcgagtccctcatgtgcgagaagcgcatcctcgccgccgtcacctccgccggccaccccttcctcgtcaacctcttcggctgcttccagacccccgagcacgtctgcttcgtcatggagtactccgccggcggcgacctcatgctccacatccactccgacgtcttctccgagccccgcgccatcttctactccgcctgcgtcgtcctcggcctccagttcctccacgagcacaagatcgtctaccgcgacctcaagctcgacaacctcctcctcgacaccgagggctacgtcaagatcgccgacttcggcctctgcaaggagggcatgggctacggcgaccgcacctccaccttctgcggcacccccgagttcctcgcccccgaggtcctcaccgacacctcctacacccgcgccgtcgactggtggggcctcggcgtcctcctctacgagatgctcgtcggcgagtcccccttccccggcgacgacgaggaggaggtcttcgactccatcgtcaacgacgaggtccgctacccccgcttcctctccgccgaggccatcggcatcatgcgccgcctcctccgccgcaaccccgagcgccgcctcggctcctccgagcgcgacgccgaggacgtcaagaagcagcccttcttccgcaccctcggctgggaggccctcctcgcccgccgcctccccccccccttcgtccccaccctctccggccgcaccgacgtctccaacttcgacgaggagttcaccggcgaggcccccaccctctcccccccccgcgacgcccgccccctcaccgccgccgagcaggccgccttcctcgacttcgacttcgtcgccggcggctgctga

SEQ ID NO: 9260 - RNA, 2829 nt, synthetic construct
  misc_feature 1..2829: note = derived and/or modified sequence opt3 fromPKN1__Homo_sapiens__BAA05169
  source 1..2829: mol_type = other RNA
atggccagcgacgctgtgcagtccgagcccagatcttggtcactgctcgaacaacttggcctggcaggggccgatttggcggctcctggagtccagcagcagttagagctggaaagggagcggctacgccgagaaatccgtaaggagctcaaactgaaggagggtgccgaaaaccttagaagggcaaccacagacctgggccggagtttggggccagttgagctcctgctgcgcggaagctccagaaggctcgatttactgcaccaacagcttcaggaattgcatgcccacgtggtactgccggaccccgctgcaactcatgatggccctcagtctccaggtgccgggggacccacgtgctcggctaccaatctatcacgggtggccggcctcgagaaacaactggcgattgagcttaaggtcaaacagggcgcagaaaacatgatacagacatacagcaatgggagtactaaggaccgcaagctgttgctcaccgcccagcaaatgctgcaggattccaaaacaaagatcgacattatccgaatgcagttaagaagggctctgcaagccggacagctcgagaaccaggcagctcctgatgacacccagggttctccagatcttggcgccgtggaactgcggattgaggaattgcgtcaccatttccgcgttgagcacgcggtggccgagggggcaaagaatgtcctaagactgctcagcgctgccaaggctcccgacaggaaagccgtgtccgaagcacaagagaagctgactgaatcaaaccagaaacttggactgttgcgggaggccctcgaacgacgcctgggcgagttacctgctgatcacccaaaaggtagactgctaagggaggaactcgcggcagccagtagcgctgccttttctacacggctggcagggccgttccccgccacccattattccacgctttgtaagcctgctccattgactggaaccctggaggtacgcgttgtgggctgcagagacctccccgaaacaatcccttggaatccaactccctcaatgggcgggccgggaacccctgacagcaggcccccatttctgagtcgtcctgcccggggtctttactctcgatccggcagcctgtcggggagatcttccttgaaagcagaggcggaaaacacatcagaggtcagtaccgtgctcaagctggataatacggtggtcggacagactagctggaaaccctgtggcccaaacgcttgggaccagtccttcacattagagctggaaagggcccgcgagctagaactcgcagttttctggcgggatcaaagaggtctgtgcgcccttaagttcttgaaactggaggactttctcgataatgagaggcacgaagtgcagctggacatggagccccaggggtgtttagtagctgaagtgaccttccgcaaccctgtcatagagcgaatcccacggctgcgtagacagaagaagatcttttctaaacaacagggcaaggccttccagagggcacgccagatgaatattgatgtggctacttgggttcggcttttgagaaggctcattccgaacgccacaggaaccggcacgtttagccccggggcgtcacctggaagtgaagcccgaaccacaggtgacatctccgtggagaaactgaatctaggcactgatagcgactcttcaccacaaaagagtagccgcgatcccccttcctctccatcgagcctgtcctcacccatacaggagagtaccgctccggaactcccttctgagacacaggaaactccagggcccgcactgtgcagccctcttcggaaatcccccttgaccctggaggacttcaagtttttagccgtcctcggaagaggccatttcggtaaggtgctgctttcagaatttaggccaagcggggagctgtttgctattaaagccttgaagaaaggcgacatcgtagcacgtgatgaggttgaatctctcatgtgtgagaagcgcattctggcggccgtgacatccgctggacaccctttcctagtcaacctgtttggctgcttccaaacccccgaacacgtgtgttttgtcatggagtatagtgccgggggagacctcatgctgcatatccacagcgatgtgttctctgaaccacgggcaatcttttactccgcttgcgttgtgcttggtttgcagttcctgcatgagcacaaaattgtatatagagacttaaagctcgataacctgcttctggacactgagggctacgtcaagatagccgattttgggctatgtaaagaaggaatgggctatggtgacaggacgtcaacattctgcgggaccccggagtttctcgcacctgaagtgctgactgataccagttacacacgagccgttgactggtggggcttgggagtgctgttatacgagatgctcgtcggcgagagccccttcccaggggatgacgaagaggaagtgtttgattcgatcgtaaatgacgaggtgcggtatccccgcttcctgtccgctgaagcgattggaatcatgagaaggcttctgcggcgaaaccctgagagacgcttgggctctagcgagagggacgccgaagatgttaagaaacagccattctttcgtaccctcggttgggaggcactgctagctcggagactgccccctccgttcgtcccaactctttcagggaggacagacgtgagtaattttgatgaagagttcacgggagaagcccccaccctctcccctccacgcgacgcccgacccctgactgctgcagagcaggccgcgtttttggatttcgactttgtggctggcggttgctga

SEQ ID NO: 9261 - RNA, 2829 nt, synthetic construct
  misc_feature 1..2829: note = derived and/or modified sequence opt4 fromPKN1__Homo_sapiens__BAA05169
  source 1..2829: mol_type = other RNA
atggccagcgacgccgtgcagagcgagcccagaagctggagcctgctggagcagctgggcctggccggcgccgacctggccgcccccggcgtgcagcagcagctggagctggagagagagagactgagaagagagatcagaaaggagctgaagctgaaggagggcgccgagaacctgagaagagccaccaccgacctgggcagaagcctgggccccgtggagctgctgctgagaggcagcagcagaagactggacctgctgcaccagcagctgcaggagctgcacgcccacgtggtgctgcccgaccccgccgccacccacgacggcccccagagccccggcgccggcggccccacctgcagcgccaccaacctgagcagagtggccggcctggagaagcagctggccatcgagctgaaggtgaagcagggcgccgagaacatgatccagacctacagcaacggcagcaccaaggacagaaagctgctgctgaccgcccagcagatgctgcaggacagcaagaccaagatcgacatcatcagaatgcagctgagaagagccctgcaggccggccagctggagaaccaggccgcccccgacgacacccagggcagccccgacctgggcgccgtggagctgagaatcgaggagctgagacaccacttcagagtggagcacgccgtggccgagggcgccaagaacgtgctgagactgctgagcgccgccaaggcccccgacagaaaggccgtgagcgaggcccaggagaagctgaccgagagcaaccagaagctgggcctgctgagagaggccctggagagaagactgggcgagctgcccgccgaccaccccaagggcagactgctgagagaggagctggccgccgccagcagcgccgccttcagcaccagactggccggccccttccccgccacccactacagcaccctgtgcaagcccgcccccctgaccggcaccctggaggtgagagtggtgggctgcagagacctgcccgagaccatcccctggaaccccacccccagcatgggcggccccggcacccccgacagcagaccccccttcctgagcagacccgccagaggcctgtacagcagaagcggcagcctgagcggcagaagcagcctgaaggccgaggccgagaacaccagcgaggtgagcaccgtgctgaagctggacaacaccgtggtgggccagaccagctggaagccctgcggccccaacgcctgggaccagagcttcaccctggagctggagagagccagagagctggagctggccgtgttctggagagaccagagaggcctgtgcgccctgaagttcctgaagctggaggacttcctggacaacgagagacacgaggtgcagctggacatggagccccagggctgcctggtggccgaggtgaccttcagaaaccccgtgatcgagagaatccccagactgagaagacagaagaagatcttcagcaagcagcagggcaaggccttccagagagccagacagatgaacatcgacgtggccacctgggtgagactgctgagaagactgatccccaacgccaccggcaccggcaccttcagccccggcgccagccccggcagcgaggccagaaccaccggcgacatcagcgtggagaagctgaacctgggcaccgacagcgacagcagcccccagaagagcagcagagacccccccagcagccccagcagcctgagcagccccatccaggagagcaccgcccccgagctgcccagcgagacccaggagacccccggccccgccctgtgcagccccctgagaaagagccccctgaccctggaggacttcaagttcctggccgtgctgggcagaggccacttcggcaaggtgctgctgagcgagttcagacccagcggcgagctgttcgccatcaaggccctgaagaagggcgacatcgtggccagagacgaggtggagagcctgatgtgcgagaagagaatcctggccgccgtgaccagcgccggccaccccttcctggtgaacctgttcggctgcttccagacccccgagcacgtgtgcttcgtgatggagtacagcgccggcggcgacctgatgctgcacatccacagcgacgtgttcagcgagcccagagccatcttctacagcgcctgcgtggtgctgggcctgcagttcctgcacgagcacaagatcgtgtacagagacctgaagctggacaacctgctgctggacaccgagggctacgtgaagatcgccgacttcggcctgtgcaaggagggcatgggctacggcgacagaaccagcaccttctgcggcacccccgagttcctggcccccgaggtgctgaccgacaccagctacaccagagccgtggactggtggggcctgggcgtgctgctgtacgagatgctggtgggcgagagccccttccccggcgacgacgaggaggaggtgttcgacagcatcgtgaacgacgaggtgagataccccagattcctgagcgccgaggccatcggcatcatgagaagactgctgagaagaaaccccgagagaagactgggcagcagcgagagagacgccgaggacgtgaagaagcagcccttcttcagaaccctgggctgggaggccctgctggccagaagactgcccccccccttcgtgcccaccctgagcggcagaaccgacgtgagcaacttcgacgaggagttcaccggcgaggcccccaccctgagcccccccagagacgccagacccctgaccgccgccgagcaggccgccttcctggacttcgacttcgtggccggcggctgctga

SEQ ID NO: 9262 - RNA, 2829 nt, synthetic construct
  misc_feature 1..2829: note = derived and/or modified sequence opt5 fromPKN1__Homo_sapiens__BAA05169
  source 1..2829: mol_type = other RNA
atggccagcgacgctgtgcagtccgagcccagatcttggagcctgctcgaacaactgggccttgccggggcggatctggctgcccctggagtccagcagcagctcgagctggaacgggagcgccttagacgggaaatccgcaaggagctgaaactcaaggagggcgccgaaaacctgagacgggctaccacagacctggggcgctccctcggaccggttgagctgcttctgagaggctctagccggcgcctcgatctgcttcaccaacagctgcaggaactccatgcccacgtggtgctgcccgaccctgctgccacgcatgatgggccccagtcccctggagcgggcggccctacctgctctgccacaaatctgagcagagtcgctgggctcgagaaacaactggccattgagcttaaggtgaaacagggagctgaaaacatgatccagacctactccaatggcagcacaaaggaccggaagctgctcctgaccgcccagcaaatgcttcaggattctaaaacaaagattgacatcattcgcatgcagctgagacgggcgctccaagccgggcagctggagaaccaggctgcccccgatgacacccagggatccccggatctgggcgctgttgaactccgcatcgaggaactgagacaccatttccgggtggagcacgccgtcgccgagggggctaaaaatgtgcttagactgctcagcgcggccaaggctcccgaccgcaaagccgtttctgaagcccaagagaagctgacggaatccaaccagaaacttggactgctccgggaggctctggaaagacgcctgggcgagctccctgccgatcaccccaagggccggctgcttagagaggaactggcggctgccagctctgccgctttttccacccgcctcgccgggcctttccccgctacacattatagcaccctgtgtaagccggcccctctgacaggaacccttgaggtgcgggtcgtgggctgcagagacctccccgaaacgatcccttggaatcccacaccctccatgggagggcctggcaccccggactctcggcccccttttctgagccgccccgcgagagggctgtactcccgcagcggatctctctccggccggagctctctgaaagccgaggctgaaaacacaagcgaggtgtccaccgtccttaagctggataataccgttgtgggccagacatcttggaaaccttgtgggcccaacgcctgggaccagagcttcacgctcgagctggaaagagctcgggagctggaacttgccgtgttttggcgcgatcaaagaggactctgcgcgctgaagttcctgaaactcgaggactttctggataatgagcggcacgaagtccagcttgacatggagccgcagggctgtctggtggccgaagttaccttcagaaaccctgtgattgagcgcatcccccggctcagacgccagaagaagattttctccaaacaacaggggaaggctttccagagagcccggcagatgaatatcgatgtcgctacatgggtgcgcctgctgagacggcttattcctaacgccaccggaacaggcacctttagccccggggcctctcctggctccgaagctcgcacgacaggagacatcagcgttgagaaactcaatctgggcaccgattctgactccagcccccaaaagtcctctagagatccgcctagctccccctctagcctgtccagccccattcaggagtctaccgcgcctgaactcccgtccgagacacaggaaacccccgggcctgccctgtgcagcccccttcggaaatctcctctgacactcgaggacttcaagtttctggctgtgctgggacgcggccatttcgggaaggtccttctctccgaatttagacccagcggagagctgtttgccatcaaagccctgaagaaaggcgacatcgtggctcgggatgaggtcgaatctctcatgtgtgagaagcgcattctggccgcggtgacgagcgctgggcaccctttccttgttaacctgtttggctgcttccaaacccccgaacacgtgtgttttgtcatggagtattccgccggaggcgacctcatgctgcatatccacagcgatgtgttctctgaaccgagagccatcttttactccgcttgcgttgtgctggggcttcagttcctgcatgagcacaaaattgtctatcgggacctcaagctggataacctcctgcttgacacagagggatacgtgaagattgccgattttggcctgtgtaaagaagggatgggatatggcgacagaaccagcacattctgcgggacccctgagtttctcgcgcccgaagtgctgacggatacctcctacacacgcgctgttgactggtggggcctgggagtccttctgtacgagatgctcgtgggcgagtctcctttccccggggatgacgaagaggaagtgtttgatagcatcgtcaatgacgaggtgcggtatccgagattcctgtccgccgaagccatcggaattatgcgccggctcctgagacgcaaccctgagcggagacttggctctagcgagcgcgacgctgaagatgttaagaaacagcccttctttcggaccctggggtgggaggccctcctggctagacggctgcctcctcccttcgtgcccacactttccggacgcaccgacgtctctaattttgatgaagagttcacgggcgaagccccgacactgagccctcccagagacgcgcggcccctcaccgccgctgagcaggccgcttttctggatttcgactttgtggccgggggctgctga

SEQ ID NO: 9263 - protein, 984 aa, synthetic construct
  REGION 1..984: note = PKN2__Homo_sapiens__Q16513
MASNPERGEILLTELQGDSRSLPFSENVSAVQKLDFSDTMVQQKLDDIKDRIKREIRKELKIKEGAENLRKVTTDKKSLAYVDNILKKSNKKLEELHHKLQELNAHIVVSDPEDITDCPRTPDTPNNDPRCSTSNNRLKALQKQLDIELKVKQGAENMIQMYSNGSSKDRKLHGTAQQLLQDSKTKIEVIRMQILQAVQTNELAFDNAKPVISPLELRMEELRHHFRIEFAVAEGAKNVMKLLGSGKVTDRKALSEAQARFNESSQKLDLLKYSLEQRLNEVPKNHPKSRIIIEELSLVAASPTLSPRQSMISTQNQYSTLSKPAALTGTLEVRLMGCQDILENVPGRSKATSVALPGWSPSETRSSFMSRTSKSKSGSSRNLLKTDDLSNDVCAVLKLDNTVVGQTSWKPISNQSWDQKFTLELDRSRELEISVYWRDWRSLCAVKFLRLEDFLDNQRHGMCLYLEPQGTLFAEVTFFNPVIERRPKLQRQKKIFSKQQGKTFLRAPQMNINIATWGRLVRRAIPTVNHSGTFSPQAPVPTTVPVVDVRIPQLAPPASDSTVTKLDFDLEPEPPPAPPRASSLGEIDESSELRVLDIPGQDSETVFDIQNDRNSILPKSQSEYKPDTPQSGLEYSGIQELEDRRSQQRFQFNLQDFRCCAVLGRGHFGKVLLAEYKNTNEMFAIKALKKGDIVARDEVDSLMCEKRIFETVNSVRHPFLVNLFACFQTKEHVCFVMEYAAGGDLMMHIHTDVFSEPRAVFYAACVVLGLQYLHEHKIVYRDLKLDNLLLDTEGFVKIADFGLCKEGMGYGDRTSTFCGTPEFLAPEVLTETSYTRAVDWWGLGVLIYEMLVGESPFPGDDEEEVFDSIVNDEVRYPRFLSTEAISIMRRLLRRNPERRLGASEKDAEDVKKHPFFRLIDWSALMDKKVKPPFIPTIRGREDVSNFDDEFTSEAPILTPPREPRILSEEEQEMFRDFDYIADWC

SEQ ID NO: 9264 - RNA, 2955 nt, synthetic construct
  misc_feature 1..2955: note = PKN2__Homo_sapiens__AAB33346
  source 1..2955: mol_type = other RNA
atggcgtccaaccccgaacggggggagattctgctcacggaactgcagggggattcccgaagtcttccgttttctgagaatgtgagtgctgttcaaaaattagacttttcagatacaatggtgcagcagaaattggatgatatcaaggatcgaattaagagagaaataaggaaagaactgaaaatcaaagaaggagctgaaaatctgaggaaagtcacaacagataaaaaaagtttggcttatgtagacaacattttgaaaaaatcaaataaaaaattagaagaactacatcacaagctgcaggaattaaatgcacatattgttgtatcagatccagaagatattacagattgcccaaggactccagatactccaaataatgaccctcgttgttctactagcaacaatagattgaaggccttacaaaaacaattggatatagaacttaaagtaaaacaaggtgcagagaatatgatacagatgtattcaaatggatcttcaaaggatcggaaactccatggtacagctcagcaactgctccaggacagcaagacaaaaatagaagtcatacgaatgcagattcttcaggcagtccagactaatgaattggcttttgataatgcaaaacctgtgataagtcctcttgaacttcggatggaagaattaaggcatcattttaggatagagtttgcagtagcagaaggtgcaaagaatgtaatgaaattacttggctcaggaaaagtaacagacagaaaagcactttcagaagctcaagcaagatttaatgaatcaagtcagaagttggaccttttaaagtattcattagagcaaagattaaacgaagtccccaagaatcatcccaaaagcaggattattattgaagaactttcacttgttgctgcatcaccaacactaagtccacgtcaaagtatgatatctacgcaaaatcaatatagtacactatccaaaccagcagcactaacaggtactttggaagttcgtcttatgggctgccaagatatcctagagaatgtccctggacggtcaaaagcaacatcagttgcactgcctggttggagtccaagtgaaaccagatcatctttcatgagcagaacgagtaaaagtaaaagcggaagtagtcgaaatcttctaaaaaccgatgacttgtccaatgatgtctgtgctgttttgaagctcgataatactgtggttggccaaactagctggaaacccatttccaatcagtcatgggaccagaagtttacactggaactggacaggtcacgtgaactggaaatttcagtttattggcgtgattggcggtctctgtgtgctgtaaaatttctgaggttagaagattttttagacaaccaacggcatggcatgtgtctctatttggaaccacagggtactttatttgcagaggttaccttttttaatccagttattgaaagaagaccaaaacttcaaagacaaaagaaaattttttcaaagcaacaaggcaaaacatttctcagagctcctcaaatgaatattaatattgccacttggggaaggctagtaagaagagctattcctacagtaaatcattctggcaccttcagccctcaagctcctgtgcctactacagtgccagtggttgatgtacgcatccctcaactagcacctccagctagtgattctacagtaaccaaattggactttgatcttgagcctgaacctcctccagccccaccacgagcttcttctcttggagaaatagatgaatcttctgaattaagagttttggatataccaggacaggattcagagactgtttttgatattcagaatgacagaaatagtatacttccaaaatctcaatctgaatacaagcctgatactcctcagtcaggcctagaatatagtggtattcaagaacttgaggacagaagatctcagcaaaggtttcagtttaatctacaagatttcaggtgttgtgctgtcttgggaagaggacattttggaaaggtgcttttagctgaatataaaaacacaaatgagatgtttgctataaaagccttaaagaaaggagatattgtggctcgagatgaagtagacagcctgatgtgtgaaaaaagaatttttgaaactgtgaatagtgtaaggcatccctttttggtgaacctttttgcatgtttccaaaccaaagagcatgtttgctttgtaatggaatatgctgccggtggggacctaatgatgcacattcatactgatgtcttttctgaaccaagagctgtattttatgctgcttgtgtagttcttgggttgcagtatttacatgaacacaaaattgtttatagagatttgaaattggataacttattgctagatacagagggctttgtgaaaattgctgattttggtctttgcaaagaaggaatgggatatggagatagaacaagcacattttgtggcactcctgaatttcttgccccagaagtattaacagaaacttcttatacaagggctgtagattggtggggccttggcgtgcttatatatgaaatgcttgttggtgagtctccctttcctggtgatgatgaagaggaagtttttgacagtattgtaaatgatgaagtaaggtatccaaggttcttatctacagaagccatttctataatgagaaggctgttaagaagaaatcctgaacggcgccttggggctagcgagaaagatgcagaggatgtaaaaaagcacccatttttccggctaattgattggagcgctctgatggacaaaaaagtaaagccaccatttatacctaccataagaggacgagaagatgttagtaattttgatgatgaatttacctcagaagcacctattctgactccacctcgagaaccaaggatactttcggaagaggagcaggaaatgttcagagattttgactacattgctgattggtgttaa

SEQ ID NO: 9265 - RNA, 2955 nt, synthetic construct
  misc_feature 1..2955: note = derived and/or modified sequence opt1 fromPKN2__Homo_sapiens__AAB33346
  source 1..2955: mol_type = other RNA
atggccagcaaccccgagcgcggcgagatcctgctcaccgagctgcagggggactcccggagcctgcccttctccgagaacgtgagcgccgtccagaagctcgacttctccgacaccatggtgcagcagaagctggacgacatcaaggaccgcatcaagcgggagatccgcaaggagctgaagatcaaggagggcgcggagaacctccggaaggtgacgaccgacaagaagtccctggcctacgtcgacaacatcctgaagaagtccaacaagaagctcgaggagctgcaccacaagctgcaggagctcaacgcccacatcgtggtgagcgaccccgaggacatcaccgactgcccccgcacccccgacacgccgaacaacgacccccggtgctccaccagcaacaaccgcctgaaggccctgcagaagcagctcgacatcgagctgaaggtcaagcagggggccgagaacatgatccagatgtactccaacggcagctccaaggaccggaagctgcacgggaccgcgcagcagctcctgcaggacagcaagaccaagatcgaggtgatccgcatgcagatcctgcaggccgtgcagacgaacgagctcgccttcgacaacgccaagcccgtcatcagccccctggagctgcggatggaggagctccgccaccacttccggatcgagttcgcggtggccgagggcgccaagaacgtgatgaagctgctgggctccgggaaggtcaccgaccgcaaggccctctccgaggcccaggcgcggttcaacgagagctcccagaagctggacctgctcaagtacagcctggagcagcgcctgaacgaggtgccgaagaaccaccccaagagccggatcatcatcgaggagctctccctggtggccgccagccccaccctgagcccccgccagtccatgatctccacccagaaccagtacagcacgctctccaagccggccgccctgaccggcaccctggaggtccggctcatggggtgccaggacatcctggagaacgtgcccggccgcagcaaggcgaccagcgtggccctgcccgggtggagcccctccgagacgcggagctccttcatgagccgcacctccaagagcaagtccggcagctcccgcaacctcctgaagaccgacgacctgagcaacgacgtctgcgccgtgctcaagctggacaacaccgtggtcggccagacgagctggaagccgatctccaaccagagctgggaccagaagttcaccctggagctcgaccggtcccgcgagctggagatcagcgtgtactggcgggactggcgctccctgtgcgccgtgaagttcctgcggctcgaggacttcctggacaaccagcgccacgggatgtgcctgtacctcgagccccagggcaccctgttcgccgaggtcaccttcttcaaccccgtgatcgagcggcgccccaagctgcagcggcagaagaagatcttcagcaagcagcaggggaagacgttcctccgcgcgccgcagatgaacatcaacatcgccacctggggccggctggtccgccgggccatccccaccgtgaaccactccggcaccttcagcccccaggcccccgtgccgacgaccgtccccgtggtggacgtccgcatcccccagctggcgcccccggcctccgacagcaccgtgaccaagctcgacttcgacctggagcccgagcccccgcccgccccgccccgggcctccagcctgggggagatcgacgagtccagcgagctccgcgtgctggacatccccggccaggactccgagacggtcttcgacatccagaacgaccggaacagcatcctgcccaagtcccagagcgagtacaagcccgacacgccccagagcgggctcgagtactccggcatccaggagctggaggaccgccggagccagcagcgcttccagttcaacctgcaggacttccgctgctgcgccgtgctcgggcggggccacttcggcaaggtgctgctggcggagtacaagaacaccaacgagatgttcgccatcaaggccctcaagaagggggacatcgtcgcccgcgacgaggtggactccctgatgtgcgagaagcggatcttcgagaccgtgaacagcgtccgccacccgttcctggtgaacctcttcgcctgcttccagaccaaggagcacgtgtgcttcgtcatggagtacgcggccggcggggacctgatgatgcacatccacaccgacgtgttctccgagccccgggccgtgttctacgccgcctgcgtcgtgctgggcctccagtacctgcacgagcacaagatcgtgtaccgcgacctgaagctcgacaacctgctgctcgacaccgaggggttcgtcaagatcgcggacttcggcctgtgcaaggagggcatggggtacggcgaccggaccagcaccttctgcgggacgcccgagttcctggcccccgaggtgctcaccgagacctcctacacccgcgccgtggactggtggggcctgggggtcctgatctacgagatgctcgtgggcgagagcccgttccccggcgacgacgaggaggaggtgttcgactccatcgtcaacgacgaggtgcggtacccccgcttcctgagcacggaggccatctccatcatgcggcgcctgctccggcgcaaccccgagcggcgcctgggggccagcgagaaggacgcggaggacgtgaagaagcacccgttcttccggctgatcgactggtccgccctcatggacaagaaggtcaagccgcccttcatccccaccatccgcggccgggaggacgtgagcaacttcgacgacgagttcacctccgaggcccccatcctgaccccgccccgcgagccccggatcctgagcgaggaggagcaggagatgttccgcgacttcgactacatcgccgactggtgctga

SEQ ID NO: 9266 - RNA, 2955 nt, synthetic construct
  misc_feature 1..2955: note = derived and/or modified sequence opt2 fromPKN2__Homo_sapiens__AAB33346
  source 1..2955: mol_type = other RNA
atggcctccaaccccgagcgcggcgagatcctcctcaccgagctccagggcgactcccgctccctccccttctccgagaacgtctccgccgtccagaagctcgacttctccgacaccatggtccagcagaagctcgacgacatcaaggaccgcatcaagcgcgagatccgcaaggagctcaagatcaaggagggcgccgagaacctccgcaaggtcaccaccgacaagaagtccctcgcctacgtcgacaacatcctcaagaagtccaacaagaagctcgaggagctccaccacaagctccaggagctcaacgcccacatcgtcgtctccgaccccgaggacatcaccgactgcccccgcacccccgacacccccaacaacgacccccgctgctccacctccaacaaccgcctcaaggccctccagaagcagctcgacatcgagctcaaggtcaagcagggcgccgagaacatgatccagatgtactccaacggctcctccaaggaccgcaagctccacggcaccgcccagcagctcctccaggactccaagaccaagatcgaggtcatccgcatgcagatcctccaggccgtccagaccaacgagctcgccttcgacaacgccaagcccgtcatctcccccctcgagctccgcatggaggagctccgccaccacttccgcatcgagttcgccgtcgccgagggcgccaagaacgtcatgaagctcctcggctccggcaaggtcaccgaccgcaaggccctctccgaggcccaggcccgcttcaacgagtcctcccagaagctcgacctcctcaagtactccctcgagcagcgcctcaacgaggtccccaagaaccaccccaagtcccgcatcatcatcgaggagctctccctcgtcgccgcctcccccaccctctccccccgccagtccatgatctccacccagaaccagtactccaccctctccaagcccgccgccctcaccggcaccctcgaggtccgcctcatgggctgccaggacatcctcgagaacgtccccggccgctccaaggccacctccgtcgccctccccggctggtccccctccgagacccgctcctccttcatgtcccgcacctccaagtccaagtccggctcctcccgcaacctcctcaagaccgacgacctctccaacgacgtctgcgccgtcctcaagctcgacaacaccgtcgtcggccagacctcctggaagcccatctccaaccagtcctgggaccagaagttcaccctcgagctcgaccgctcccgcgagctcgagatctccgtctactggcgcgactggcgctccctctgcgccgtcaagttcctccgcctcgaggacttcctcgacaaccagcgccacggcatgtgcctctacctcgagccccagggcaccctcttcgccgaggtcaccttcttcaaccccgtcatcgagcgccgccccaagctccagcgccagaagaagatcttctccaagcagcagggcaagaccttcctccgcgccccccagatgaacatcaacatcgccacctggggccgcctcgtccgccgcgccatccccaccgtcaaccactccggcaccttctccccccaggcccccgtccccaccaccgtccccgtcgtcgacgtccgcatcccccagctcgccccccccgcctccgactccaccgtcaccaagctcgacttcgacctcgagcccgagcccccccccgcccccccccgcgcctcctccctcggcgagatcgacgagtcctccgagctccgcgtcctcgacatccccggccaggactccgagaccgtcttcgacatccagaacgaccgcaactccatcctccccaagtcccagtccgagtacaagcccgacaccccccagtccggcctcgagtactccggcatccaggagctcgaggaccgccgctcccagcagcgcttccagttcaacctccaggacttccgctgctgcgccgtcctcggccgcggccacttcggcaaggtcctcctcgccgagtacaagaacaccaacgagatgttcgccatcaaggccctcaagaagggcgacatcgtcgcccgcgacgaggtcgactccctcatgtgcgagaagcgcatcttcgagaccgtcaactccgtccgccaccccttcctcgtcaacctcttcgcctgcttccagaccaaggagcacgtctgcttcgtcatggagtacgccgccggcggcgacctcatgatgcacatccacaccgacgtcttctccgagccccgcgccgtcttctacgccgcctgcgtcgtcctcggcctccagtacctccacgagcacaagatcgtctaccgcgacctcaagctcgacaacctcctcctcgacaccgagggcttcgtcaagatcgccgacttcggcctctgcaaggagggcatgggctacggcgaccgcacctccaccttctgcggcacccccgagttcctcgcccccgaggtcctcaccgagacctcctacacccgcgccgtcgactggtggggcctcggcgtcctcatctacgagatgctcgtcggcgagtcccccttccccggcgacgacgaggaggaggtcttcgactccatcgtcaacgacgaggtccgctacccccgcttcctctccaccgaggccatctccatcatgcgccgcctcctccgccgcaaccccgagcgccgcctcggcgcctccgagaaggacgccgaggacgtcaagaagcaccccttcttccgcctcatcgactggtccgccctcatggacaagaaggtcaagccccccttcatccccaccatccgcggccgcgaggacgtctccaacttcgacgacgagttcacctccgaggcccccatcctcacccccccccgcgagccccgcatcctctccgaggaggagcaggagatgttccgcgacttcgactacatcgccgactggtgctga

SEQ ID NO: 9267 - RNA, 2955 nt, synthetic construct
  misc_feature 1..2955: note = derived and/or modified sequence opt3 fromPKN2__Homo_sapiens__AAB33346
  source 1..2955: mol_type = other RNA
atggccagcaaccccgagagaggcgaaatcctgctcaccgagcttcagggggactccaggtctctgcctttctcagaaaatgtgagtgctgtccaaaagttggattttagcgacacaatggttcagcagaaattagatgacattaaggatcggataaaacgcgagatccgaaaggaactgaaaattaaggagggagcagagaacctacgtaaggtgactacggacaaaaagtccctcgcctacgtagataatatcctgaaaaagtctaacaaaaagctggaggaacttcaccataagttgcaggaactcaatgcgcacattgtggtctcggacccagaggatatcaccgactgcccgagaacacccgatactcctaacaatgacccaaggtgttcaaccagcaacaatcggctgaaagctctgcaaaagcagctcgatatagagttaaaagtgaagcagggtgccgaaaacatgatccagatgtatagtaatggctcctctaaagaccgcaagctgcatgggacagcacaacagcttttgcaggacagcaaaaccaagattgaggttatcagaatgcagattctgcaagccgtgcagactaacgaactagctttcgataatgcaaagcccgtcatctcccctctcgagctgaggatggaggaacttcggcaccattttcgcatagagttcgccgtggctgaaggagccaaaaacgtaatgaagctgttgggctcaggtaaagttacagaccgaaaggcgctcagtgaggcacaggccagatttaatgaaagctctcaaaaactggatttactgaagtactccctcgagcagaggcttaacgaagtgccaaagaaccaccccaaatcacggattatcattgaggagctgagcttggtcgctgccagtcctaccctatctccacgtcagtccatgatcagcacgcagaatcaatattcgactctgtctaagccggcagctctcaccgggacactggaagtgcgccttatgggatgccaggacatcctggagaacgtgcccggcagatccaaagccacttcagtcgcgttgcctggctggagtccaagcgaaaccaggtcctctttcatgagccggacatcaaagagtaaatccgggagctctcgaaatctcctgaagaccgatgacttatcaaacgatgtttgtgccgtgctgaagctagacaatacggtagtgggacagacttcctggaaacccattagcaaccagtcctgggatcaaaagtttacactcgagctggaccgctctagagaacttgagatatcggtctactggagggattggcggagcttgtgcgcagtgaaattcctgcgcctcgaggactttctggacaatcagagacacggtatgtgtctttatctggaacctcagggcaccttgttcgctgaggttacatttttcaacccagtgatcgaaaggcgtcccaagctccagcggcagaaaaagatttttagtaagcaacaggggaaaactttcctgcgagccccgcagatgaatatcaacatagctacctggggaagattagtcaggcgcgccattcctacggtgaatcattcaggcaccttcagtccccaagcaccagtacctacaactgttcccgtggtcgatgtgcggatcccacagctggctccccctgcctctgacagcaccgtcacaaagctagattttgacctcgagccagagccgccccctgcgccacccagagcatcctcactgggtgaaatcgatgagagctctgaacttagggtgttggacattcctgggcaggattccgagactgttttcgacatccaaaacgatcgcaatagtattctgccaaaaagccagtctgaatacaagcccgacaccccgcagtccggactcgagtattcaggcatacaggagctggaagatcgacggagtcaacagcgttttcagttcaacttacaggactttagatgctgtgccgtgctgggcagggggcacttcggaaaagtacttttggctgagtacaagaatacaaacgaaatgtttgccatcaaagcactcaagaagggtgatattgtcgcccgcgacgaggtggacagcctgatgtgcgaaaaacggatcttcgagaccgttaactcggtgagacatccttttctagtcaatctgttcgcttgttttcaaactaaggagcacgtgtgcttcgtaatggaatacgccgcaggcggggatctcatgatgcacatccatacggacgtgttttccgagccaagggcggttttctatgctgcctgtgtcgtgctgggacttcagtacttgcacgaacataaaattgtgtatcgagatctgaagttagacaacctcctgcttgatacagagggcttcgtcaaaatagcagactttggtctgtgcaaggaagggatgggctacggagatcgcacctctactttctgcggcacccccgagtttttggcccctgaggttctcacagaaaccagctatactcgggctgtggactggtgggggctgggagtgctaatctacgagatgctggtaggtgaatcacccttcccaggcgatgacgaggaggaagtctttgatagtattgtgaatgacgaggttagatatcctaggttcctctccacagaagccatctctattatgcgtcgcctgcttcggagaaaccccgagaggcgattgggggcaagcgaaaaggatgctgaggacgtgaaaaagcacccatttttccggctgatcgactggtccgccttaatggataaaaaggtcaaaccgccttttatacccacgatccgcggaagagaggacgtgtcaaatttcgatgacgaatttaccagcgaggcgccaattctcactccccctagggaaccacggatcctgagtgaggaggaacaggagatgttccgagattttgactacattgccgattggtgttga

SEQ ID NO: 9268 - RNA, 2955 nt, synthetic construct
  misc_feature 1..2955: note = derived and/or modified sequence opt4 fromPKN2__Homo_sapiens__AAB33346
  source 1..2955: mol_type = other RNA
atggccagcaaccccgagagaggcgagatcctgctgaccgagctgcagggcgacagcagaagcctgcccttcagcgagaacgtgagcgccgtgcagaagctggacttcagcgacaccatggtgcagcagaagctggacgacatcaaggacagaatcaagagagagatcagaaaggagctgaagatcaaggagggcgccgagaacctgagaaaggtgaccaccgacaagaagagcctggcctacgtggacaacatcctgaagaagagcaacaagaagctggaggagctgcaccacaagctgcaggagctgaacgcccacatcgtggtgagcgaccccgaggacatcaccgactgccccagaacccccgacacccccaacaacgaccccagatgcagcaccagcaacaacagactgaaggccctgcagaagcagctggacatcgagctgaaggtgaagcagggcgccgagaacatgatccagatgtacagcaacggcagcagcaaggacagaaagctgcacggcaccgcccagcagctgctgcaggacagcaagaccaagatcgaggtgatcagaatgcagatcctgcaggccgtgcagaccaacgagctggccttcgacaacgccaagcccgtgatcagccccctggagctgagaatggaggagctgagacaccacttcagaatcgagttcgccgtggccgagggcgccaagaacgtgatgaagctgctgggcagcggcaaggtgaccgacagaaaggccctgagcgaggcccaggccagattcaacgagagcagccagaagctggacctgctgaagtacagcctggagcagagactgaacgaggtgcccaagaaccaccccaagagcagaatcatcatcgaggagctgagcctggtggccgccagccccaccctgagccccagacagagcatgatcagcacccagaaccagtacagcaccctgagcaagcccgccgccctgaccggcaccctggaggtgagactgatgggctgccaggacatcctggagaacgtgcccggcagaagcaaggccaccagcgtggccctgcccggctggagccccagcgagaccagaagcagcttcatgagcagaaccagcaagagcaagagcggcagcagcagaaacctgctgaagaccgacgacctgagcaacgacgtgtgcgccgtgctgaagctggacaacaccgtggtgggccagaccagctggaagcccatcagcaaccagagctgggaccagaagttcaccctggagctggacagaagcagagagctggagatcagcgtgtactggagagactggagaagcctgtgcgccgtgaagttcctgagactggaggacttcctggacaaccagagacacggcatgtgcctgtacctggagccccagggcaccctgttcgccgaggtgaccttcttcaaccccgtgatcgagagaagacccaagctgcagagacagaagaagatcttcagcaagcagcagggcaagaccttcctgagagccccccagatgaacatcaacatcgccacctggggcagactggtgagaagagccatccccaccgtgaaccacagcggcaccttcagcccccaggcccccgtgcccaccaccgtgcccgtggtggacgtgagaatcccccagctggccccccccgccagcgacagcaccgtgaccaagctggacttcgacctggagcccgagcccccccccgccccccccagagccagcagcctgggcgagatcgacgagagcagcgagctgagagtgctggacatccccggccaggacagcgagaccgtgttcgacatccagaacgacagaaacagcatcctgcccaagagccagagcgagtacaagcccgacaccccccagagcggcctggagtacagcggcatccaggagctggaggacagaagaagccagcagagattccagttcaacctgcaggacttcagatgctgcgccgtgctgggcagaggccacttcggcaaggtgctgctggccgagtacaagaacaccaacgagatgttcgccatcaaggccctgaagaagggcgacatcgtggccagagacgaggtggacagcctgatgtgcgagaagagaatcttcgagaccgtgaacagcgtgagacaccccttcctggtgaacctgttcgcctgcttccagaccaaggagcacgtgtgcttcgtgatggagtacgccgccggcggcgacctgatgatgcacatccacaccgacgtgttcagcgagcccagagccgtgttctacgccgcctgcgtggtgctgggcctgcagtacctgcacgagcacaagatcgtgtacagagacctgaagctggacaacctgctgctggacaccgagggcttcgtgaagatcgccgacttcggcctgtgcaaggagggcatgggctacggcgacagaaccagcaccttctgcggcacccccgagttcctggcccccgaggtgctgaccgagaccagctacaccagagccgtggactggtggggcctgggcgtgctgatctacgagatgctggtgggcgagagccccttccccggcgacgacgaggaggaggtgttcgacagcatcgtgaacgacgaggtgagataccccagattcctgagcaccgaggccatcagcatcatgagaagactgctgagaagaaaccccgagagaagactgggcgccagcgagaaggacgccgaggacgtgaagaagcaccccttcttcagactgatcgactggagcgccctgatggacaagaaggtgaagccccccttcatccccaccatcagaggcagagaggacgtgagcaacttcgacgacgagttcaccagcgaggcccccatcctgaccccccccagagagcccagaatcctgagcgaggaggagcaggagatgttcagagacttcgactacatcgccgactggtgctga

SEQ ID NO: 9269 - RNA, 2955 nt, synthetic construct
  misc_feature 1..2955: note = derived and/or modified sequence opt5 fromPKN2__Homo_sapiens__AAB33346
  source 1..2955: mol_type = other RNA
atggccagcaaccccgagagaggcgaaatcctgctcaccgagctgcagggggactcccggtctcttcctttcagcgaaaatgtgtccgctgtccaaaagctggatttttctgacacaatggttcagcagaaactcgatgacattaaggatcgcatcaaaagagagattcggaaggaactgaaaatcaaggagggagccgagaaccttcgcaaggtgacgaccgacaaaaagagcctggcgtacgtggataatattctcaaaaagtccaacaaaaagctggaggaactgcaccataagctccaggaactgaatgctcacatcgtcgtgtctgacccggaggatatcacagactgccccagaacccctgatacacccaacaatgaccctcggtgtagcacctccaacaatcgccttaaagccctgcaaaagcagctcgatattgagctgaaagttaagcagggcgccgaaaacatgatccagatgtatagcaatgggtcttccaaagacagaaaacttcatggaacagctcaacagctgctccaggacagcaaaaccaagattgaggtgatccggatgcagattctgcaagccgtccagacgaacgaactggctttcgataatgccaagcccgtgatctctcctctcgagctgcgcatggaggaacttagacaccattttcggattgagttcgcggttgccgaaggcgctaaaaacgtgatgaagctgctcgggtccggaaaagtcaccgaccgcaaggccctgagcgaggctcaggccagatttaatgaatcttcccaaaaacttgatctgctcaagtacagcctggagcagcggctgaacgaagtgccgaagaaccaccccaaatcccgcatcatcattgaggagctctctctggtggcggccagccctacactttcccccagacagagcatgatctctacccagaatcaatattccacactgagcaagcctgctgccctcaccggcacgctggaagtccggcttatgggctgccaggacattctggagaacgttcccgggagatctaaagctacaagcgtggccctcccgggatggtccccttctgaaacccgcagctccttcatgagccggacatctaagtccaaaagcgggtcttccagaaatctgctgaagaccgatgacctcagcaacgatgtgtgtgccgtcctgaaacttgacaataccgtggttggccagacatcctggaagcccatctctaaccagagctgggatcaaaagtttacgctggagctcgaccgctcccgggaactggagatttctgtgtactggagagattggcgcagcctgtgcgctgtcaaattccttcggctcgaggactttctggacaatcagagacacggaatgtgtctgtatctcgaacctcagggcaccctgttcgcggaggtgacatttttcaaccccgttatcgaacgccggcccaaacttcagagacaaaagaagatcttttccaagcagcaggggaagaccttcctgcgcgcccctcagatgaatattaacatcgctacatggggacggctcgtgagacgggccattccgaccgtcaatcatagcggcacgttctctccccaagcccctgtgcccacaaccgtccctgtggttgatgtgcgcatcccccagctggctccgcctgcctccgacagcaccgtcacaaagctggattttgaccttgagcccgagcctccccctgcgcccccgagagcttcttccctcggcgaaattgatgagagctctgaactgcgggtgctggacatccctgggcaggatagcgagaccgttttcgacatccaaaacgatagaaattccattctccccaaaagccagtctgaatacaagcccgacacacctcagtccggactggagtatagcggcatccaggagcttgaagatcgccggtcccaacagagatttcagttcaacctgcaggactttcgctgctgtgccgtgctcgggagaggacacttcggcaaagtcctgctggccgagtacaagaatacgaacgaaatgtttgctattaaagcccttaagaagggggatatcgtggctcgggacgaggtggactctctcatgtgcgaaaaacgcattttcgagaccgttaacagcgtcagacatccgtttctggtgaatctgttcgcctgttttcaaacaaaggagcacgtgtgcttcgtcatggaatacgcggccggaggcgatctcatgatgcacatccataccgacgtgttttccgagccccgggctgttttctatgccgcttgtgtggtcctgggccttcagtacctgcacgaacataaaattgtgtatcgcgatctcaagctggacaacctgcttctcgatacagaggggttcgttaaaatcgccgactttggactgtgcaaggaaggcatggggtacggagatagaacctctacgttctgcggcacccctgagtttctggcgcccgaggtgctcacagaaaccagctatacacgggccgtcgactggtgggggctgggcgtgcttatctacgagatgctggttggagaatcccctttccccggcgatgacgaggaggaagtgtttgattctattgtcaatgacgaggtgcgctatcctagattcctcagcaccgaagctatctccattatgcggcgcctgctgagacggaaccccgagagacgccttggggccagcgaaaaggatgctgaggacgtgaaaaagcacccgtttttccggctgatcgactggtctgccctcatggataaaaaggtcaaacctccctttattcctacgatcagaggacgcgaggacgtttccaatttcgatgacgaatttacaagcgaggcccccatcctgaccccgcctcgggaaccccgcattctctctgaggaggaacaggagatgttcagagattttgactacatcgctgattggtgttga

SEQ ID NO: 9270 - protein, 889 aa, synthetic construct
  REGION 1..889: note = PKN3__Homo_sapiens__Q6P5Z2
MEEGAPRQPGPSQWPPEDEKEVIRRAIQKELKIKEGVENLRRVATDRRHLGHVQQLLRSSNRRLEQLHGELRELHARILLPGPGPGPAEPVASGPRPWAEQLRARHLEALRRQLHVELKVKQGAENMTHTCASGTPKERKLLAAAQQMLRDSQLKVALLRMKISSLEASGSPEPGPELLAEELQHRLHVEAAVAEGAKNVVKLLSSRRTQDRKALAEAQAQLQESSQKLDLLRLALEQLLEQLPPAHPLRSRVTRELRAAVPGYPQPSGTPVKPTALTGTLQVRLLGCEQLLTAVPGRSPAAALASSPSEGWLRTKAKHQRGRGELASEVLAVLKVDNRVVGQTGWGQVAEQSWDQTFVIPLERARELEIGVHWRDWRQLCGVAFLRLEDFLDNACHQLSLSLVPQGLLFAQVTFCDPVIERRPRLQRQERIFSKRRGQDFLRASQMNLGMAAWGRLVMNLLPPCSSPSTISPPKGCPRTPTTLREASDPATPSNFLPKKTPLGEEMTPPPKPPRLYLPQEPTSEETPRTKRPHMEPRTRRGPSPPASPTRKPPRLQDFRCLAVLGRGHFGKVLLVQFKGTGKYYAIKALKKQEVLSRDEIESLYCEKRILEAVGCTGHPFLLSLLACFQTSSHACFVTEFVPGGDLMMQIHEDVFPEPQARFYVACVVLGLQFLHEKKIIYRDLKLDNLLLDAQGFLKIADFGLCKEGIGFGDRTSTFCGTPEFLAPEVLTQEAYTRAVDWWGLGVLLYEMLVGECPFPGDTEEEVFDCIVNMDAPYPGFLSVQGLEFIQKLLQKCPEKRLGAGEQDAEEIKVQPFFRTTNWQALLARTIQPPFVPTLCGPADLRYFEGEFTGLPPALTPPAPHSLLTARQQAAFRDFDFVSERFLEP

SEQ ID NO: 9271 - RNA, 2670 nt, synthetic construct
  misc_feature 1..2670: note = PKN3__Homo_sapiens__AAH62558
  source 1..2670: mol_type = other RNA
atggaggagggggcgccgcggcagcctgggccgagccagtggcccccagaggatgagaaggaggtgatccgccgggccatccagaaagagctgaagatcaaggagggggtggagaacctgcggcgcgtggccacagaccgccgccacttgggccatgtgcagcagctgctgcggtcctccaaccgccgcctggagcagctgcatggcgagctgcgggagctgcacgcccgaatcctgctgcccggccctgggcctggcccagctgagcctgtggcctcaggaccccggccgtgggcagagcagctcagggctcggcacctagaggctctccggaggcagctgcatgtggagctgaaggtgaagcagggggctgagaacatgacccacacgtgcgccagtggcacccccaaggagaggaagctcctggcagctgcccagcagatgctgcgggacagccagctgaaggtggccctgctgcggatgaagatcagcagcctggaggccagtgggtccccggagccagggcctgagctgctggcggaggagctacagcatcgactgcacgttgaggcagctgtggctgagggcgccaagaacgtggtgaaactgcttagtagccggagaacacaggaccgcaaggcactggctgaggcccaggcccagctacaggagtcctctcagaaactggacctcctgcgcctggccttggagcagctgctggagcaactgcctcctgcccaccctttgcgcagcagagtgacccgagagttgcgggctgcggtgcctggatacccccagccttcagggacacctgtgaagcccaccgccctaacagggacactgcaggtccgcctcctgggctgtgaacagttgctgacagccgtgcctgggcgctccccagcggccgcactggccagcagcccctccgagggctggcttcggaccaaggccaagcaccagcgtggccgaggcgagcttgccagcgaggtgctggctgtgctaaaggtggacaaccgtgttgtggggcagacgggctgggggcaggtggccgaacagtcctgggaccagacctttgtcatcccactggagcgagcccgtgagctggagattggggtacactggcgggactggcggcagctatgtggcgtggccttcctgagacttgaggacttcctggacaatgcctgtcaccaactgtccctcagcctggtaccgcagggactgctttttgcccaggtgaccttctgcgatcctgtcattgagaggcggccccggctgcagaggcaggaacgcatcttctctaaacgcagaggccaggacttcctgagggcttcgcagatgaacctcggcatggcggcctgggggcgcctcgtcatgaacctgctgcccccctgcagctccccgagcacaatcagcccccctaaaggatgccctcggaccccaacaacactgcgagaggcctctgaccctgccactcccagtaatttcctgcccaagaagacccccttgggtgaagagatgacacccccacccaagcccccacgcctctacctcccccaggagccaacatccgaggagactccgcgcaccaaacgtccccatatggagcctaggactcgacgtgggccatctccaccagcctcccccaccaggaaaccccctcggcttcaggacttccgctgcttagctgtgctgggccggggacactttgggaaggtcctcctggtccagttcaaggggacagggaaatactacgccatcaaagcactgaagaagcaggaggtgctcagccgggacgagatagagagcctgtactgcgagaagcggatcctggaggctgtgggctgcacagggcaccctttcctgctctccctccttgcctgcttccagacctccagccatgcctgctttgtgactgagtttgtgcctggtggtgacctcatgatgcagatccacgaggatgtcttccccgagccccaggcccgcttctacgtggcttgtgttgtcctggggctgcagttcttacacgagaagaagatcatttacagggacctgaagttggataaccttctgctggatgcccagggattcctgaagatcgcagactttggactctgcaaggaagggatcggcttcggggaccggactagcaccttctgtggcaccccggagttcctggctcccgaggtgctgacccaggaggcatacacacgggctgtggactggtgggggctgggtgtgctgctctacgagatgctggtgggtgagtgcccgttcccaggggacacagaggaagaggtgtttgactgcatcgtcaacatggacgccccctaccccggctttctgtcggtgcaagggcttgagttcattcagaagctcctccagaagtgcccggagaagcgcctcggggcaggtgagcaggatgccgaggagatcaaggtccagccattcttcaggaccaccaactggcaagccctgctcgcccgcaccatccagccccccttcgtgcctaccctgtgtggccctgcggacctgcgctactttgagggcgagttcacagggctgccgcctgccctgaccccacctgcaccccacagcctcctcactgcccgccaacaggccgccttccgggacttcgactttgtgtcagagcgattcctggaaccctga

SEQ ID NO: 9272 - RNA, 2670 nt, synthetic construct
  misc_feature 1..2670: note = derived and/or modified sequence opt1 fromPKN3__Homo_sapiens__AAH62558
  source 1..2670: mol_type = other RNA
atggaggagggcgcgccccgccagccggggcccagccagtggccgcccgaggacgagaaggaggtgatccggcgcgccatccagaaggagctgaagatcaaggagggcgtcgagaacctccggcgcgtggccaccgaccggcgccacctggggcacgtgcagcagctgctccggtccagcaaccgccggctggagcagctgcacggcgagctccgcgagctgcacgcccggatcctgctcccggggcccggccccggccccgccgagccggtcgcctccgggccccgcccctgggccgagcagctgcgggcgcgccacctggaggccctccggcgccagctgcacgtggagctgaaggtgaagcagggcgccgagaacatgacccacacgtgcgccagcgggacccccaaggagcggaagctcctggcggccgcccagcagatgctgcgcgactcccagctcaaggtcgccctgctgcggatgaagatcagctccctcgaggccagcggctccccggagcccgggcccgagctgctggcggaggagctccagcaccgcctgcacgtggaggccgccgtggccgagggcgccaagaacgtcgtgaagctgctcagctcccggcgcacccaggaccgcaaggcgctggccgaggcccaggcccagctgcaggagagctcccagaagctcgacctgctgcggctcgccctggagcagctgctcgagcagctgcccccggcgcaccccctgcgcagccgggtgacccgcgagctccgggccgccgtccccggctacccccagccgtccgggacgcccgtgaagcccaccgccctgaccggcaccctccaggtgcgcctcctggggtgcgagcagctgctcacggccgtccccggccggagcccggcggccgccctggcctccagcccctccgagggctggctgcgcaccaaggcgaagcaccagcgggggcgcggcgagctcgccagcgaggtgctggccgtgctgaaggtcgacaaccgggtggtggggcagaccggctgggggcaggtcgccgagcagagctgggaccagaccttcgtgatccccctggagcgcgcccgggagctcgagatcggcgtgcactggcgcgactggcggcagctgtgcggcgtcgcgttcctgcgcctcgaggacttcctggacaacgcctgccaccagctgtccctcagcctggtgccccaggggctcctcttcgcccaggtcacgttctgcgacccggtgatcgagcggcgcccccggctgcagcgccaggagcgcatcttctccaagcggcgcggccaggacttcctgcgggccagccagatgaacctcgggatggccgcgtggggccgcctggtgatgaacctgctgcccccgtgctccagcccctccaccatcagcccgcccaaggggtgcccccggacccccaccacgctgcgcgaggcctccgaccccgccacccccagcaacttcctgccgaagaagacgcccctcggcgaggagatgaccccgccgcccaagccgccccggctgtacctgccccaggagcccacctccgaggagacgccccgcaccaagcggccccacatggagccccgcacccggcgcggccccagcccgcccgcctcccccacccggaagccgccccgcctccaggacttccggtgcctggccgtcctggggcgcggccacttcgggaaggtgctcctggtgcagttcaagggcaccgggaagtactacgcgatcaaggccctgaagaagcaggaggtcctcagccgggacgagatcgagtccctgtactgcgagaagcgcatcctggaggccgtgggctgcaccggccaccccttcctcctgagcctgctcgcctgcttccagacctccagccacgcgtgcttcgtgacggagttcgtccccgggggcgacctgatgatgcagatccacgaggacgtgttccccgagccccaggcccggttctacgtggcctgcgtcgtgctggggctccagttcctgcacgagaagaagatcatctaccgcgacctgaagctcgacaacctgctgctcgacgcccagggcttcctgaagatcgccgacttcggcctgtgcaaggaggggatcggcttcggggaccggacctccaccttctgcggcacccccgagttcctcgcgcccgaggtgctgacgcaggaggcctacacccgcgccgtcgactggtgggggctgggcgtgctcctgtacgagatgctggtgggcgagtgccccttccccggggacaccgaggaggaggtcttcgactgcatcgtgaacatggacgccccctacccgggcttcctcagcgtgcaggggctggagttcatccagaagctgctccagaagtgccccgagaagcgcctgggcgccggggagcaggacgcggaggagatcaaggtccagcccttcttccggaccacgaactggcaggccctgctcgcccgcaccatccagcccccgttcgtgcccaccctgtgcggccccgccgacctgcggtacttcgagggcgagttcaccgggctgcccccggccctgaccccgcccgcgccccacagcctgctcacggcccgccagcaggccgccttccgggacttcgacttcgtgtccgagcgcttcctggagccctga

SEQ ID NO: 9273 - RNA, 2670 nt, synthetic construct
  misc_feature 1..2670: note = derived and/or modified sequence opt2 fromPKN3__Homo_sapiens__AAH62558
  source 1..2670: mol_type = other RNA
atggaggagggcgccccccgccagcccggcccctcccagtggccccccgaggacgagaaggaggtcatccgccgcgccatccagaaggagctcaagatcaaggagggcgtcgagaacctccgccgcgtcgccaccgaccgccgccacctcggccacgtccagcagctcctccgctcctccaaccgccgcctcgagcagctccacggcgagctccgcgagctccacgcccgcatcctcctccccggccccggccccggccccgccgagcccgtcgcctccggcccccgcccctgggccgagcagctccgcgcccgccacctcgaggccctccgccgccagctccacgtcgagctcaaggtcaagcagggcgccgagaacatgacccacacctgcgcctccggcacccccaaggagcgcaagctcctcgccgccgcccagcagatgctccgcgactcccagctcaaggtcgccctcctccgcatgaagatctcctccctcgaggcctccggctcccccgagcccggccccgagctcctcgccgaggagctccagcaccgcctccacgtcgaggccgccgtcgccgagggcgccaagaacgtcgtcaagctcctctcctcccgccgcacccaggaccgcaaggccctcgccgaggcccaggcccagctccaggagtcctcccagaagctcgacctcctccgcctcgccctcgagcagctcctcgagcagctcccccccgcccaccccctccgctcccgcgtcacccgcgagctccgcgccgccgtccccggctacccccagccctccggcacccccgtcaagcccaccgccctcaccggcaccctccaggtccgcctcctcggctgcgagcagctcctcaccgccgtccccggccgctcccccgccgccgccctcgcctcctccccctccgagggctggctccgcaccaaggccaagcaccagcgcggccgcggcgagctcgcctccgaggtcctcgccgtcctcaaggtcgacaaccgcgtcgtcggccagaccggctggggccaggtcgccgagcagtcctgggaccagaccttcgtcatccccctcgagcgcgcccgcgagctcgagatcggcgtccactggcgcgactggcgccagctctgcggcgtcgccttcctccgcctcgaggacttcctcgacaacgcctgccaccagctctccctctccctcgtcccccagggcctcctcttcgcccaggtcaccttctgcgaccccgtcatcgagcgccgcccccgcctccagcgccaggagcgcatcttctccaagcgccgcggccaggacttcctccgcgcctcccagatgaacctcggcatggccgcctggggccgcctcgtcatgaacctcctccccccctgctcctccccctccaccatctccccccccaagggctgcccccgcacccccaccaccctccgcgaggcctccgaccccgccaccccctccaacttcctccccaagaagacccccctcggcgaggagatgacccccccccccaagcccccccgcctctacctcccccaggagcccacctccgaggagaccccccgcaccaagcgcccccacatggagccccgcacccgccgcggcccctccccccccgcctcccccacccgcaagcccccccgcctccaggacttccgctgcctcgccgtcctcggccgcggccacttcggcaaggtcctcctcgtccagttcaagggcaccggcaagtactacgccatcaaggccctcaagaagcaggaggtcctctcccgcgacgagatcgagtccctctactgcgagaagcgcatcctcgaggccgtcggctgcaccggccaccccttcctcctctccctcctcgcctgcttccagacctcctcccacgcctgcttcgtcaccgagttcgtccccggcggcgacctcatgatgcagatccacgaggacgtcttccccgagccccaggcccgcttctacgtcgcctgcgtcgtcctcggcctccagttcctccacgagaagaagatcatctaccgcgacctcaagctcgacaacctcctcctcgacgcccagggcttcctcaagatcgccgacttcggcctctgcaaggagggcatcggcttcggcgaccgcacctccaccttctgcggcacccccgagttcctcgcccccgaggtcctcacccaggaggcctacacccgcgccgtcgactggtggggcctcggcgtcctcctctacgagatgctcgtcggcgagtgccccttccccggcgacaccgaggaggaggtcttcgactgcatcgtcaacatggacgccccctaccccggcttcctctccgtccagggcctcgagttcatccagaagctcctccagaagtgccccgagaagcgcctcggcgccggcgagcaggacgccgaggagatcaaggtccagcccttcttccgcaccaccaactggcaggccctcctcgcccgcaccatccagccccccttcgtccccaccctctgcggccccgccgacctccgctacttcgagggcgagttcaccggcctcccccccgccctcaccccccccgccccccactccctcctcaccgcccgccagcaggccgccttccgcgacttcgacttcgtctccgagcgcttcctcgagccctga

SEQ ID NO: 9274 - RNA, 2670 nt, synthetic construct
  misc_feature 1..2670: note = derived and/or modified sequence opt3 fromPKN3__Homo_sapiens__AAH62558
  source 1..2670: mol_type = other RNA
atggaggaaggcgcccccagacagcctgggccaagccaatggccgcccgaggacgaaaaggaggtgatcaggcgggctattcagaaagaactgaagataaaagagggagtcgagaacctccgccgagttgcaaccgatcgtagacaccttggtcatgtgcagcagctgttgaggtcctctaatcggcgcttagaacaactgcacggcgagctaagagaactccatgccaggatcctgcttcctgggccaggacccggccctgcggagccagtagcttcaggtccccggccttgggccgagcagctgcgcgcacgacacttggaagccctcagaaggcagctgcatgtggagctgaaggtcaaacagggggctgaaaacatgacacacacttgcgcaagtggaacgccaaaggagcggaagctcttagccgctgcccaacagatgctgcgtgacagccagcttaaagtggcgttgctgcgcatgaagatttcctctctagaagcatcgggctcaccggagcccggccctgagctcctggccgaagagttgcagcacagactgcatgttgaagctgccgtggcagagggggctaaaaatgtcgtgaagttgctcagcagtaggcggacccaagatcgaaaagccctggcggaagcccaggcacagttacaagagtcctctcagaagctggacctccttcgcctggctttggagcagctactggaacagctcccacccgcccaccctctgagaagcagggtaacacgggagcttcgcgctgccgttccaggatacccccaaccgtccggtactcctgtgaagcccaccgcactgacaggcaccttgcaggtcagactcctggggtgtgaacagttactgactgccgtgccaggaaggtcccctgctgcggcactagccagtagcccctctgagggctggctccgtacaaaagctaagcatcagcggggtcgaggggaactggcctccgaggtgcttgcagtcttgaaagttgataacagagtggtaggacaaaccggctggggccaggtggccgagcagtcatgggaccagacgttcgtcatcccactggaaagggctcgcgagctcgaaattggggtgcactggcgggattggagacaactgtgcggagttgcctttcttaggctggaggacttcttggataatgcatgtcaccagctcagcctgagtttagtgccccagggtctgctatttgcgcaggtcactttctgcgaccctgtgatcgagcgccgaccacggctccaacgtcaggaaagaatattttctaagaggcgcggccaggatttcctgcgggcttcccaaatgaaccttgggatggccgcatggggaagattggtaatgaatctgctcccgccctgtagctcgccttctaccatctccccacccaaaggctgccctaggacaccaactaccctgcgagaggcctcagaccccgctacaccgagtaactttttacctaagaaaaccccactgggtgaagagatgacgccccctcccaagccacctcgcctttatttgccccaggaaccaactagcgaggagacaccgcggaccaagagacctcatatggaacccaggactcgtcgcgggccatcaccccctgcctctccaacacggaaaccccctagactccaggatttcaggtgtctggcagttctaggccgaggacactttggcaaggtgctgctcgtccagttcaaagggaccggaaagtactatgctattaaagccctgaagaagcaagaggtgcttagccgggacgaaatcgagtcattgtactgcgaaaaacgcattctggaggcggtcggttgtacgggccatccgtttttactcagtctgcttgcctgcttccagacctccagccacgcttgttttgtgacagagttcgttccagggggagacctgatgatgcagatccatgaagatgtgttccccgagcctcaggcaagattttatgtagcctgcgtcgtgttgggcctccaattcctgcacgaaaagaaaataatttacagggacctaaagctggataatctcctgcttgacgctcagggttttcttaaaatcgccgatttcgggctgtgcaaggagggcattggatttggcgaccggacttctaccttctgtgggacaccagaatttttagcacccgaggttctcactcaggaggcgtatacccgagccgtggattggtggggactgggtgtccttctgtacgaaatgctagtgggcgagtgccctttcccgggggacacagaagaggaggtatttgattgtatcgtgaacatggacgctccctacccaggattcctctcagttcagggcctggaatttatccaaaagttgctgcagaaatgccctgagaagagattaggtgccggggaacaggatgcagaggaaattaaagtccaacccttctttcgcaccactaattggcaggctctcctggccaggacgatacagccacctttcgtgcccacactttgtggcccagcagacctgcgttatttcgagggagagtttaccggcttgccgcctgccctcactcccccagctccccacagtctgctaaccgcgcggcagcaagccgcattcagagactttgatttcgtgagcgaaaggtttctggagccttga

SEQ ID NO: 9275 - RNA, 2670 nt, synthetic construct
  misc_feature 1..2670: note = derived and/or modified sequence opt4 fromPKN3__Homo_sapiens__AAH62558
  source 1..2670: mol_type = other RNA
atggaggagggcgcccccagacagcccggccccagccagtggccccccgaggacgagaaggaggtgatcagaagagccatccagaaggagctgaagatcaaggagggcgtggagaacctgagaagagtggccaccgacagaagacacctgggccacgtgcagcagctgctgagaagcagcaacagaagactggagcagctgcacggcgagctgagagagctgcacgccagaatcctgctgcccggccccggccccggccccgccgagcccgtggccagcggccccagaccctgggccgagcagctgagagccagacacctggaggccctgagaagacagctgcacgtggagctgaaggtgaagcagggcgccgagaacatgacccacacctgcgccagcggcacccccaaggagagaaagctgctggccgccgcccagcagatgctgagagacagccagctgaaggtggccctgctgagaatgaagatcagcagcctggaggccagcggcagccccgagcccggccccgagctgctggccgaggagctgcagcacagactgcacgtggaggccgccgtggccgagggcgccaagaacgtggtgaagctgctgagcagcagaagaacccaggacagaaaggccctggccgaggcccaggcccagctgcaggagagcagccagaagctggacctgctgagactggccctggagcagctgctggagcagctgccccccgcccaccccctgagaagcagagtgaccagagagctgagagccgccgtgcccggctacccccagcccagcggcacccccgtgaagcccaccgccctgaccggcaccctgcaggtgagactgctgggctgcgagcagctgctgaccgccgtgcccggcagaagccccgccgccgccctggccagcagccccagcgagggctggctgagaaccaaggccaagcaccagagaggcagaggcgagctggccagcgaggtgctggccgtgctgaaggtggacaacagagtggtgggccagaccggctggggccaggtggccgagcagagctgggaccagaccttcgtgatccccctggagagagccagagagctggagatcggcgtgcactggagagactggagacagctgtgcggcgtggccttcctgagactggaggacttcctggacaacgcctgccaccagctgagcctgagcctggtgccccagggcctgctgttcgcccaggtgaccttctgcgaccccgtgatcgagagaagacccagactgcagagacaggagagaatcttcagcaagagaagaggccaggacttcctgagagccagccagatgaacctgggcatggccgcctggggcagactggtgatgaacctgctgcccccctgcagcagccccagcaccatcagcccccccaagggctgccccagaacccccaccaccctgagagaggccagcgaccccgccacccccagcaacttcctgcccaagaagacccccctgggcgaggagatgacccccccccccaagccccccagactgtacctgccccaggagcccaccagcgaggagacccccagaaccaagagaccccacatggagcccagaaccagaagaggccccagcccccccgccagccccaccagaaagccccccagactgcaggacttcagatgcctggccgtgctgggcagaggccacttcggcaaggtgctgctggtgcagttcaagggcaccggcaagtactacgccatcaaggccctgaagaagcaggaggtgctgagcagagacgagatcgagagcctgtactgcgagaagagaatcctggaggccgtgggctgcaccggccaccccttcctgctgagcctgctggcctgcttccagaccagcagccacgcctgcttcgtgaccgagttcgtgcccggcggcgacctgatgatgcagatccacgaggacgtgttccccgagccccaggccagattctacgtggcctgcgtggtgctgggcctgcagttcctgcacgagaagaagatcatctacagagacctgaagctggacaacctgctgctggacgcccagggcttcctgaagatcgccgacttcggcctgtgcaaggagggcatcggcttcggcgacagaaccagcaccttctgcggcacccccgagttcctggcccccgaggtgctgacccaggaggcctacaccagagccgtggactggtggggcctgggcgtgctgctgtacgagatgctggtgggcgagtgccccttccccggcgacaccgaggaggaggtgttcgactgcatcgtgaacatggacgccccctaccccggcttcctgagcgtgcagggcctggagttcatccagaagctgctgcagaagtgccccgagaagagactgggcgccggcgagcaggacgccgaggagatcaaggtgcagcccttcttcagaaccaccaactggcaggccctgctggccagaaccatccagccccccttcgtgcccaccctgtgcggccccgccgacctgagatacttcgagggcgagttcaccggcctgccccccgccctgaccccccccgccccccacagcctgctgaccgccagacagcaggccgccttcagagacttcgacttcgtgagcgagagattcctggagccctga

SEQ ID NO: 9276 - RNA, 2670 nt, synthetic construct
  misc_feature 1..2670: note = derived and/or modified sequence opt5 fromPKN3__Homo_sapiens__AAH62558
  source 1..2670: mol_type = other RNA
atggaggaaggcgcccccagacagcctgggccgagccaatggccccctgaggacgaaaaggaggtgatccggcgcgctattcagaaagaactgaagatcaaagagggagtcgagaacctcagacgggttgccaccgatcgcagacacctgggccatgtgcagcagcttctgcggtcctctaatcgcagactcgaacaactgcacggggagcttcgggaactgcatgcgcgcattctcctgcccggacctggccccgggcctgctgagccggtggccagcggacccagaccttgggccgagcagctgcgggctcgccacctcgaagccctgagacggcagcttcatgtcgagctgaaggtgaaacagggcgctgaaaacatgacacacacgtgcgcctccggcacccccaaggagcgcaagctcctggcggccgctcaacagatgcttagagactctcagctgaaagttgccctcctgcggatgaagatcagctccctggaagcctctgggagccctgagcccggaccggagctcctggccgaggaacttcagcacagactgcatgtggaagcggccgtcgctgagggcgccaaaaatgtggttaagctcctgtccagccgccggacacaagatagaaaagctcttgccgaagcccaggctcagctgcaagagtcttcccagaagctcgacctgctgcgcctcgcgctggagcagcttctggaacagctccctcccgcccaccctctgcggagcagagtgacccgcgagcttcgggctgccgtccccgggtacccccaaccttctggaacaccggtgaagcccaccgccctgacaggcaccctccaggtgagactgctggggtgtgaacagctcctgacggctgtccctggacgctcccccgccgcggctcttgccagctctccttccgagggctggctgcggaccaaagccaagcatcagagaggccgcggggaactcgctagcgaggttctggccgtgctgaaagtggataaccgggtcgtgggacaaacaggctgggggcaggttgctgagcagtcctgggaccagaccttcgtgattccccttgaaagagcccgggagctcgaaatcggagtccactggcgcgattggagacaactgtgcggcgtggcgtttctgcggctcgaggacttcctggataatgcctgtcaccagctttctctgagcctcgttccgcaggggctgctgtttgctcaggtgacattctgcgaccctgtcatcgagagacgcccccggcttcaaagacaggaacgcatcttttccaagagacggggacaggatttcctccgcgccagccaaatgaacctgggcatggctgcctggggcagactggtgatgaatctcctgcctccctgttcttcccctagcaccatttctcccccgaaagggtgccctcggacgcccacaacccttcgcgaggcgagcgaccccgccacaccttccaactttctgccgaagaaaacacccctcggagaagagatgacccctccccctaagccccctagactgtatctgccccaggaaccgacctctgaggagacgcctcggaccaagcgcccccatatggaacctagaacacggcgcggccccagcccgcctgcttcccccaccagaaaacctccccggcttcaggatttcagatgtctcgccgtcctggggcgcggacactttggcaaggtgctgctcgttcagttcaaagggacaggcaagtactatgctattaaagccctgaagaagcaagaggtgcttagccgggacgaaatcgagtctctgtactgcgaaaaacgcattctcgaggccgtcggatgtaccggccatccctttctgctgtcccttctcgcttgcttccagacgagctctcacgcgtgttttgtgacagagttcgttcctgggggagacctgatgatgcagatccatgaagatgtgttcccggagccccaggccagattttatgtcgcttgcgtggtgctgggcctccaattcctgcacgaaaagaaaattatctaccgggaccttaagctggataatctcctgctggacgcccaggggtttcttaaaatcgccgatttcggactgtgcaaggagggcattgggtttggcgacagaacctccaccttctgtggaacacctgaatttctcgctcccgaggttctgacccaggaggcctatacacgcgcggtcgattggtggggcctcggggtgctgctttacgaaatgctggtgggagagtgccctttccccggcgacacggaagaggaggtctttgattgtatcgtgaacatggacgctccttacccggggttcctcagcgttcagggactggaatttattcaaaagctgcttcagaaatgccccgagaagcggctgggcgccggggaacaggatgccgaggaaatcaaagtgcaacctttctttagaaccacaaattggcaggctctcctggcccgcaccattcagccccctttcgtccccacactctgtggcccggcggacctgcggtatttcgagggagagtttaccggccttcctcccgctctgacgccccctgctccccactccctcctgaccgccagacagcaagctgccttccgggactttgatttcgtgtctgaacgctttctggagccttga

SEQ ID NO: 9277 - protein, 672 aa, synthetic construct
  REGION 1..672: note = PRKCA__Homo_sapiens__P17252
MADVFPGNDSTASQDVANRFARKGALRQKNVHEVKDHKFIARFFKQPTFCSHCTDFIWGFGKQGFQCQVCCFVVHKRCHEFVTFSCPGADKGPDTDDPRSKHKFKIHTYGSPTFCDHCGSLLYGLIHQGMKCDTCDMNVHKQCVINVPSLCGMDHTEKRGRIYLKAEVADEKLHVTVRDAKNLIPMDPNGLSDPYVKLKLIPDPKNESKQKTKTIRSTLNPQWNESFTFKLKPSDKDRRLSVEIWDWDRTTRNDFMGSLSFGVSELMKMPASGWYKLLNQEEGEYYNVPIPEGDEEGNMELRQKFEKAKLGPAGNKVISPSEDRKQPSNNLDRVKLTDFNFLMVLGKGSFGKVMLADRKGTEELYAIKILKKDVVIQDDDVECTMVEKRVLALLDKPPFLTQLHSCFQTVDRLYFVMEYVNGGDLMYHIQQVGKFKEPQAVFYAAEISIGLFFLHKRGIIYRDLKLDNVMLDSEGHIKIADFGMCKEHMMDGVTTRTFCGTPDYIAPEIIAYQPYGKSVDWWAYGVLLYEMLAGQPPFDGEDEDELFQSIMEHNVSYPKSLSKEAVSVCKGLMTKHPAKRLGCGPEGERDVREHAFFRRIDWEKLENREIQPPFKPKVCGKGAENFDKFFTRGQPVLTPPDQLVIANIDQSDFEGFSYVNPQFVHPILQSAV

SEQ ID NO: 9278 - RNA, 2019 nt, synthetic construct
  misc_feature 1..2019: note = PRKCA__Homo_sapiens__CCDS11664.1
  source 1..2019: mol_type = other RNA
atggctgacgttttcccgggcaacgactccacggcgtctcaggacgtggccaaccgcttcgcccgcaaaggggcgctgaggcagaagaacgtgcacgaggtgaaggaccacaaattcatcgcgcgcttcttcaagcagcccaccttctgcagccactgcaccgacttcatctgggggtttgggaaacaaggcttccagtgccaagtttgctgttttgtggtccacaagaggtgccatgaatttgttactttttcttgtccgggtgcggataagggacccgacactgatgaccccaggagcaagcacaagttcaaaatccacacttacggaagccccaccttctgcgatcactgtgggtcactgctctatggacttatccatcaagggatgaaatgtgacacctgcgatatgaacgttcacaagcaatgcgtcatcaatgtccccagcctctgcggaatggatcacactgagaagagggggcggatttacctaaaggctgaggttgctgatgaaaagctccatgtcacagtacgagatgcaaaaaatctaatccctatggatccaaacgggctttcagatccttatgtgaagctgaaacttattcctgatcccaagaatgaaagcaagcaaaaaaccaaaaccatccgctccacactaaatccgcagtggaatgagtcctttacattcaaattgaaaccttcagacaaagaccgacgactgtctgtagaaatctgggactgggatcgaacaacaaggaatgacttcatgggatccctttcctttggagtttcggagctgatgaagatgccggccagtggatggtacaagttgcttaaccaagaagaaggtgagtactacaacgtacccattccggaaggggacgaggaaggaaacatggaactcaggcagaaattcgagaaagccaaacttggccctgctggcaacaaagtcatcagtccctctgaagacaggaaacaaccttccaacaaccttgaccgagtgaaactcacggacttcaatttcctcatggtgttgggaaaggggagttttggaaaggtgatgcttgccgacaggaagggcacagaagaactgtatgcaatcaaaatcctgaagaaggatgtggtgattcaggatgatgacgtggagtgcaccatggtagaaaagcgagtcttggccctgcttgacaaacccccgttcttgacgcagctgcactcctgcttccagacagtggatcggctgtacttcgtcatggaatatgtcaacggtggggacctcatgtaccacattcagcaagtaggaaaatttaaggaaccacaagcagtattctatgcggcagagatttccatcggattgttctttcttcataaaagaggaatcatttatagggatctgaagttagataacgtcatgttggattcagaaggacatatcaaaattgctgactttgggatgtgcaaggaacacatgatggatggagtcacgaccaggaccttctgtgggactccagattatatcgccccagagataatcgcttatcagccgtatggaaaatctgtggactggtgggcctatggcgtcctgttgtatgaaatgcttgccgggcagcctccatttgatggtgaagatgaagacgagctatttcagtctatcatggagcacaacgtttcctatccaaaatccttgtccaaggaggctgtttctgtctgcaaaggactgatgaccaaacacccagccaagcggctgggctgtgggcctgagggggagagggacgtgagagagcatgccttcttccggaggatcgactgggaaaaactggagaacagggagatccagccaccattcaagcccaaagtgtgtggcaaaggagcagagaactttgacaagttcttcacacgaggacagcccgtcttaacaccacctgatcagctggttattgctaacatagaccagtctgattttgaagggttctcgtatgtcaacccccagtttgtgcaccccatcttacagagtgcagtatga

SEQ ID NO: 9279 - RNA, 2019 nt, synthetic construct
  misc_feature 1..2019: note = derived and/or modified sequence opt1 fromPRKCA__Homo_sapiens__CCDS11664.1
  source 1..2019: mol_type = other RNA
atggccgacgtgttccccggcaacgacagcaccgcctcccaggacgtcgcgaaccgcttcgcccggaagggggccctgcgccagaagaacgtgcacgaggtgaaggaccacaagttcatcgcccggttcttcaagcagccgaccttctgcagccactgcaccgacttcatctggggcttcgggaagcagggcttccagtgccaggtctgctgcttcgtggtgcacaagcgctgccacgagttcgtcaccttctcctgccccggggccgacaagggccccgacaccgacgacccccggagcaagcacaagttcaagatccacacctacggctccccgacgttctgcgaccactgcgggagcctcctgtacggcctgatccaccaggggatgaagtgcgacacgtgcgacatgaacgtgcacaagcagtgcgtgatcaacgtcccctccctctgcggcatggaccacaccgagaagcgcgggcggatctacctgaaggcggaggtggccgacgagaagctgcacgtgaccgtccgcgacgccaagaacctcatccccatggaccccaacggcctgagcgacccgtacgtgaagctgaagctcatccccgaccccaagaacgagtccaagcagaagaccaagaccatccggagcaccctgaacccccagtggaacgagtccttcaccttcaagctgaagccgagcgacaaggaccgccggctctccgtggagatctgggactgggaccgcacgacccggaacgacttcatgggcagcctgtccttcggggtcagcgagctgatgaagatgcccgcctccggctggtacaagctcctgaaccaggaggagggggagtactacaacgtgcccatccccgagggcgacgaggagggcaacatggagctgcgccagaagttcgagaaggcgaagctcgggccggccggcaacaaggtgatcagcccctccgaggaccggaagcagcccagcaacaacctggaccgcgtcaagctgaccgacttcaacttcctcatggtgctggggaagggcagcttcgggaaggtgatgctggccgaccggaagggcaccgaggagctctacgccatcaagatcctgaagaaggacgtcgtgatccaggacgacgacgtggagtgcacgatggtcgagaagcgcgtgctggccctcctggacaagcccccgttcctgacccagctccactcctgcttccagaccgtcgaccggctgtacttcgtgatggagtacgtgaacggcggggacctgatgtaccacatccagcaggtcggcaagttcaaggagccccaggcggtgttctacgccgccgagatcagcatcggcctcttcttcctgcacaagcgcgggatcatctaccgggacctgaagctcgacaacgtgatgctggactccgaggggcacatcaagatcgccgacttcggcatgtgcaaggagcacatgatggacggcgtcaccacgcgcaccttctgcgggacccccgactacatcgcccccgagatcatcgcgtaccagccgtacggcaagagcgtggactggtgggcctacggggtgctgctctacgagatgctggccggccagccgcccttcgacggggaggacgaggacgagctgttccagtccatcatggagcacaacgtcagctaccccaagtccctcagcaaggaggccgtgtccgtgtgcaagggcctgatgaccaagcaccccgccaagcgcctgggctgcgggcccgagggcgagcgggacgtccgcgagcacgcgttcttccggcgcatcgactgggagaagctcgagaaccgggagatccagcccccgttcaagcccaaggtgtgcgggaagggcgccgagaacttcgacaagttcttcacgcgcggccagcccgtgctgacgcccccggaccagctggtcatcgccaacatcgaccagagcgacttcgaggggttctcctacgtgaacccccagttcgtgcaccccatcctccagagcgccgtctga

SEQ ID NO: 9280 - RNA, 2019 nt, synthetic construct
  misc_feature 1..2019: note = derived and/or modified sequence opt2 fromPRKCA__Homo_sapiens__CCDS11664.1
  source 1..2019: mol_type = other RNA
atggccgacgtcttccccggcaacgactccaccgcctcccaggacgtcgccaaccgcttcgcccgcaagggcgccctccgccagaagaacgtccacgaggtcaaggaccacaagttcatcgcccgcttcttcaagcagcccaccttctgctcccactgcaccgacttcatctggggcttcggcaagcagggcttccagtgccaggtctgctgcttcgtcgtccacaagcgctgccacgagttcgtcaccttctcctgccccggcgccgacaagggccccgacaccgacgacccccgctccaagcacaagttcaagatccacacctacggctcccccaccttctgcgaccactgcggctccctcctctacggcctcatccaccagggcatgaagtgcgacacctgcgacatgaacgtccacaagcagtgcgtcatcaacgtcccctccctctgcggcatggaccacaccgagaagcgcggccgcatctacctcaaggccgaggtcgccgacgagaagctccacgtcaccgtccgcgacgccaagaacctcatccccatggaccccaacggcctctccgacccctacgtcaagctcaagctcatccccgaccccaagaacgagtccaagcagaagaccaagaccatccgctccaccctcaacccccagtggaacgagtccttcaccttcaagctcaagccctccgacaaggaccgccgcctctccgtcgagatctgggactgggaccgcaccacccgcaacgacttcatgggctccctctccttcggcgtctccgagctcatgaagatgcccgcctccggctggtacaagctcctcaaccaggaggagggcgagtactacaacgtccccatccccgagggcgacgaggagggcaacatggagctccgccagaagttcgagaaggccaagctcggccccgccggcaacaaggtcatctccccctccgaggaccgcaagcagccctccaacaacctcgaccgcgtcaagctcaccgacttcaacttcctcatggtcctcggcaagggctccttcggcaaggtcatgctcgccgaccgcaagggcaccgaggagctctacgccatcaagatcctcaagaaggacgtcgtcatccaggacgacgacgtcgagtgcaccatggtcgagaagcgcgtcctcgccctcctcgacaagccccccttcctcacccagctccactcctgcttccagaccgtcgaccgcctctacttcgtcatggagtacgtcaacggcggcgacctcatgtaccacatccagcaggtcggcaagttcaaggagccccaggccgtcttctacgccgccgagatctccatcggcctcttcttcctccacaagcgcggcatcatctaccgcgacctcaagctcgacaacgtcatgctcgactccgagggccacatcaagatcgccgacttcggcatgtgcaaggagcacatgatggacggcgtcaccacccgcaccttctgcggcacccccgactacatcgcccccgagatcatcgcctaccagccctacggcaagtccgtcgactggtgggcctacggcgtcctcctctacgagatgctcgccggccagccccccttcgacggcgaggacgaggacgagctcttccagtccatcatggagcacaacgtctcctaccccaagtccctctccaaggaggccgtctccgtctgcaagggcctcatgaccaagcaccccgccaagcgcctcggctgcggccccgagggcgagcgcgacgtccgcgagcacgccttcttccgccgcatcgactgggagaagctcgagaaccgcgagatccagccccccttcaagcccaaggtctgcggcaagggcgccgagaacttcgacaagttcttcacccgcggccagcccgtcctcaccccccccgaccagctcgtcatcgccaacatcgaccagtccgacttcgagggcttctcctacgtcaacccccagttcgtccaccccatcctccagtccgccgtctga

SEQ ID NO: 9281 - RNA, 2019 nt, synthetic construct
  misc_feature 1..2019: note = derived and/or modified sequence opt3 fromPRKCA__Homo_sapiens__CCDS11664.1
  source 1..2019: mol_type = other RNA
atggccgacgtgttccccggcaacgatagcaccgcttcccaggacgtcgcaaatagatttgccaggaagggggcgctgcggcaaaagaacgttcacgaggtgaaggatcataaattcatcgctcgctttttcaagcagcctaccttttgctctcactgtactgacttcatttggggatttggtaaacagggcttccagtgccaagtatgttgctttgtggtccataagcgatgtcacgagttcgtgacgttttcatgcccaggggccgataagggaccggacaccgatgacccccgtagtaaacataagttcaaaatacacacatacggcagccctactttttgtgatcactgcggttccctcctttatgggctgatccatcagggaatgaagtgtgatacctgcgacatgaatgttcacaaacagtgtgtgattaacgtcccatctttgtgcggcatggaccatacagaaaagagaggcaggatctacttaaaggcagaagtggccgatgagaaactgcacgtaaccgttcgggacgctaagaatctaattcccatggaccctaacgggctctcggatccatatgtgaaactgaaacttatccccgaccctaaaaatgaatcaaagcagaaaactaagacaatacgcagcaccctgaacccacaatggaatgagagtttcacgttcaagttgaaaccgtccgataaggacagaaggctctctgtcgagatctgggattgggaccggactacccgcaacgattttatgggaagcctgtccttcggtgtgtcagaactgatgaaaatgcccgcaagtggctggtacaagctcttaaatcaggaggaaggggagtattacaacgtgcctattccagagggagacgaagagggcaatatggaactgcgacagaaatttgagaaggccaaacttggtcccgctgggaacaaggtcatcagcccttctgaagatagaaagcagccatccaataacttggacagggttaaactgacagatttcaactttctaatggtgctcggaaagggctcattcggcaaagtaatgctggccgaccggaaggggactgaggagctttatgcgattaagatcctgaaaaaggacgtggtcatacaagatgacgatgtggaatgcaccatggttgagaaacgtgtgttggcactcctggacaagcccccgtttttaacacagctgcacagctgtttccagaccgtcgatcgcctctactttgtgatggaatacgtaaatggaggtgaccttatgtatcatattcaacaggttggcaaattcaaggagcctcaggccgtgttttacgctgccgaaatcagtattgggctgttctttttgcacaagagaggaatcatctatagggatctaaaactggacaacgtcatgctcgattctgagggccatattaagatagcagacttcggtatgtgcaaagagcacatgatggatggggtgacgactcggacattctgtggcacccccgactacatcgctccagaaattatcgcctatcagccttacggaaagtccgtcgattggtgggcgtatggcgtgctgctttacgagatgctggccgggcaacccccatttgacggagaagacgaggatgaattgttccagagcataatggagcataatgtttcgtaccccaaatctctctccaaggaggcagtgtcagtatgcaaaggtctgatgactaagcaccctgctaagcgattaggctgtgggccagaaggagagcgcgacgtcagagaacacgcctttttcaggcggattgattgggagaaactggagaaccgcgaaatccagccgccctttaagcctaaagtgtgcggcaagggtgctgagaatttcgacaaatttttcacaagagggcagccagttctaacaccccctgatcaactcgtgatcgccaacattgaccagagtgattttgaaggcttcagctatgtcaatccacagtttgtgcatcccatcctgcagtccgcagtatga

SEQ ID NO: 9282 - RNA, 2019 nt, synthetic construct
  misc_feature 1..2019: note = derived and/or modified sequence opt4 fromPRKCA__Homo_sapiens__CCDS11664.1
  source 1..2019: mol_type = other RNA
atggccgacgtgttccccggcaacgacagcaccgccagccaggacgtggccaacagattcgccagaaagggcgccctgagacagaagaacgtgcacgaggtgaaggaccacaagttcatcgccagattcttcaagcagcccaccttctgcagccactgcaccgacttcatctggggcttcggcaagcagggcttccagtgccaggtgtgctgcttcgtggtgcacaagagatgccacgagttcgtgaccttcagctgccccggcgccgacaagggccccgacaccgacgaccccagaagcaagcacaagttcaagatccacacctacggcagccccaccttctgcgaccactgcggcagcctgctgtacggcctgatccaccagggcatgaagtgcgacacctgcgacatgaacgtgcacaagcagtgcgtgatcaacgtgcccagcctgtgcggcatggaccacaccgagaagagaggcagaatctacctgaaggccgaggtggccgacgagaagctgcacgtgaccgtgagagacgccaagaacctgatccccatggaccccaacggcctgagcgacccctacgtgaagctgaagctgatccccgaccccaagaacgagagcaagcagaagaccaagaccatcagaagcaccctgaacccccagtggaacgagagcttcaccttcaagctgaagcccagcgacaaggacagaagactgagcgtggagatctgggactgggacagaaccaccagaaacgacttcatgggcagcctgagcttcggcgtgagcgagctgatgaagatgcccgccagcggctggtacaagctgctgaaccaggaggagggcgagtactacaacgtgcccatccccgagggcgacgaggagggcaacatggagctgagacagaagttcgagaaggccaagctgggccccgccggcaacaaggtgatcagccccagcgaggacagaaagcagcccagcaacaacctggacagagtgaagctgaccgacttcaacttcctgatggtgctgggcaagggcagcttcggcaaggtgatgctggccgacagaaagggcaccgaggagctgtacgccatcaagatcctgaagaaggacgtggtgatccaggacgacgacgtggagtgcaccatggtggagaagagagtgctggccctgctggacaagccccccttcctgacccagctgcacagctgcttccagaccgtggacagactgtacttcgtgatggagtacgtgaacggcggcgacctgatgtaccacatccagcaggtgggcaagttcaaggagccccaggccgtgttctacgccgccgagatcagcatcggcctgttcttcctgcacaagagaggcatcatctacagagacctgaagctggacaacgtgatgctggacagcgagggccacatcaagatcgccgacttcggcatgtgcaaggagcacatgatggacggcgtgaccaccagaaccttctgcggcacccccgactacatcgcccccgagatcatcgcctaccagccctacggcaagagcgtggactggtgggcctacggcgtgctgctgtacgagatgctggccggccagccccccttcgacggcgaggacgaggacgagctgttccagagcatcatggagcacaacgtgagctaccccaagagcctgagcaaggaggccgtgagcgtgtgcaagggcctgatgaccaagcaccccgccaagagactgggctgcggccccgagggcgagagagacgtgagagagcacgccttcttcagaagaatcgactgggagaagctggagaacagagagatccagccccccttcaagcccaaggtgtgcggcaagggcgccgagaacttcgacaagttcttcaccagaggccagcccgtgctgaccccccccgaccagctggtgatcgccaacatcgaccagagcgacttcgagggcttcagctacgtgaacccccagttcgtgcaccccatcctgcagagcgccgtgtga

SEQ ID NO: 9283 - RNA, 2019 nt, synthetic construct
  misc_feature 1..2019: note = derived and/or modified sequence opt5 fromPRKCA__Homo_sapiens__CCDS11664.1
  source 1..2019: mol_type = other RNA
atggccgacgtgttccccggcaacgatagcaccgcttcccaggacgtcgccaatagatttgcgcggaagggggctctgcgccagaaaaacgttcacgaggtgaaggatcataaattcatcgccagatttttcaagcaacctacattttgctctcactgtacggacttcatttggggatttggcaaacaggggttccagtgccaagtgtgttgctttgtcgtgcataagcggtgtcacgagttcgttacctttagctgcccgggagccgataagggccccgacacagatgaccctcgctccaaacataagttcaaaatccacacctacgggtctcccacattttgtgatcactgcggaagcctcctgtatggccttattcatcagggcatgaagtgtgatacctgcgacatgaatgtgcacaaacagtgtgtcatcaacgtgccttccctgtgcgggatggaccatacagaaaagagaggacggatttacctcaaggctgaagttgccgatgagaaactgcacgtgaccgtccgcgacgctaagaatcttatccccatggaccctaacggcctgtctgatccgtatgtgaaactcaagctgatccccgaccctaaaaatgaaagcaagcagaaaacgaagaccattagatccacactgaacccccaatggaatgagagcttcaccttcaagctcaaaccttctgataaggaccggcgcctgtccgtggagatctgggattgggacagaacaacccggaacgattttatggggagcctttctttcggagtctccgaactgatgaaaatgcccgccagcggctggtacaagctcctgaatcaggaggaaggggagtattacaacgttccgattcctgagggagacgaagagggcaatatggaacttcgccagaaatttgagaaggcgaagctgggccccgccgggaacaaagtgatctctccttccgaagatagaaagcagcccagcaataacctcgaccgggtgaaactgacggatttcaactttctgatggtcctcggaaagggctccttcgggaaagtgatgctggctgaccgcaagggaacagaggagctttatgccattaagatcctgaaaaaggacgttgtgattcaagatgacgatgtcgaatgcaccatggtggagaaaagagttctcgctctgcttgacaagcccccttttctgacacagctccactcttgtttccagaccgtggatcggctgtactttgtcatggaatacgtgaatggcggggacctgatgtatcatatccaacaggtcggaaaattcaaggagccgcaggccgtgttttacgcggccgaaatcagcattggcctcttctttctgcacaagagaggcatcatttatcgcgatcttaaactggacaacgttatgctcgattccgaggggcatatcaagattgctgacttcggaatgtgcaaagagcacatgatggatggcgtgaccacacggacgttctgtgggacccccgactacatcgcccctgaaatcattgcttatcagccctacggaaagagcgtcgattggtgggcctatggcgtgctgctttacgagatgctggccgggcaacctccctttgacggcgaagacgaggatgaactcttccagtctatcatggagcataatgtttcctacccgaaaagcctgtctaaggaggctgtgagcgtctgcaaaggactgatgacaaagcaccctgcgaagagactcggctgtgggcccgaaggagagcgcgacgtgcgggaacacgcctttttcagacgcattgattgggagaaactggagaaccgggaaatccagcctccctttaagcctaaagtgtgcggcaagggggctgagaatttcgacaaatttttcaccagaggacagcccgttcttacaccgcctgatcaactggtcattgccaacatcgaccagtccgattttgaaggcttctcttatgtgaatccccagtttgtgcatcccatcctccagagcgccgtctga

SEQ ID NO: 9284 - protein, 878 aa, synthetic construct
  REGION 1..878: note = PRKD2__Homo_sapiens__NP_001073349.1
MATAPSYPAGLPGSPGPGSPPPPGGLELQSPPPLLPQIPAPGSGVSFHIQIGLTREFVLLPAASELAHVKQLACSIVDQKFPECGFYGLYDKILLFKHDPTSANLLQLVRSSGDIQEGDLVEVVLSASATFEDFQIRPHALTVHSYRAPAFCDHCGEMLFGLVRQGLKCDGCGLNYHKRCAFSIPNNCSGARKRRLSSTSLASGHSVRLGTSESLPCTAEELSRSTTELLPRRPPSSSSSSSASSYTGRPIELDKMLLSKVKVPHTFLIHSYTRPTVCQACKKLLKGLFRQGLQCKDCKFNCHKRCATRVPNDCLGEALINGDVPMEEATDFSEADKSALMDESEDSGVIPGSHSENALHASEEEEGEGGKAQSSLGYIPLMRVVQSVRHTTRKSSTTLREGWVVHYSNKDTLRKRHYWRLDCKCITLFQNNTTNRYYKEIPLSEILTVESAQNFSLVPPGTNPHCFEIVTANATYFVGEMPGGTPGGPSGQGAEAARGWETAIRQALMPVILQDAPSAPGHAPHRQASLSISVSNSQIQENVDIATVYQIFPDEVLGSGQFGVVYGGKHRKTGRDVAVKVIDKLRFPTKQESQLRNEVAILQSLRHPGIVNLECMFETPEKVFVVMEKLHGDMLEMILSSEKGRLPERLTKFLITQILVALRHLHFKNIVHCDLKPENVLLASADPFPQVKLCDFGFARIIGEKSFRRSVVGTPAYLAPEVLLNQGYNRSLDMWSVGVIMYVSLSGTFPFNEDEDINDQIQNAAFMYPASPWSHISAGAIDLINNLLQVKMRKRYSVDKSLSHPWLQEYQTWLDLRELEGKMGERYITHESDDARWEQFAAEHPLPGSGLPTDRDLGGACPPQDHDMQGLAERISVL

SEQ ID NO: 9285 - RNA, 2637 nt, synthetic construct
  misc_feature 1..2637: note = PRKD2__Homo_sapiens__CCDS12689.1
  source 1..2637: mol_type = other RNA
atggccaccgccccctcttatcccgccgggctccctggctctcccgggccggggtctcctccgccccccggcggcctagagctgcagtcgccgccaccgctactgccccagatcccggccccgggttccggggtctcctttcacatccagatcgggctgacccgcgagttcgtgctgttgcccgccgcctccgagctggctcatgtgaagcagctggcctgttccatcgtggaccagaagttccctgagtgtggcttctacggcctttacgacaagatcctgcttttcaaacatgaccccacgtcggccaacctcctgcagctggtgcgctcgtccggagacatccaggagggcgacctggtggaggtggtgctgtcggcctcggccaccttcgaggacttccagatccgcccgcacgccctcacggtgcactcctatcgggcgcctgccttctgtgatcactgcggggagatgctcttcggcctagtgcgccagggcctcaagtgcgatggctgcgggctgaactaccacaagcgctgtgccttcagcatccccaacaactgtagtggggcccgcaaacggcgcctgtcatccacgtctctggccagtggccactcggtgcgcctcggcacctccgagtccctgccctgcacggctgaagagctgagccgtagcaccaccgaactcctgcctcgccgtcccccgtcatcctcttcctcctcttctgcctcatcgtatacgggccgccccattgagctggacaagatgctgctctccaaggtcaaggtgccgcacaccttcctcatccacagctatacacggcccaccgtttgccaggcttgcaagaaactcctcaagggcctcttccggcagggcctgcaatgcaaagactgcaagtttaactgtcacaaacgctgcgccacccgcgtccctaatgactgcctgggggaggcccttatcaatggagatgtgccgatggaggaggccaccgatttcagcgaggctgacaagagcgccctcatggatgagtcagaggactccggtgtcatccctggctcccactcagagaatgcgctccacgccagtgaggaggaggaaggcgagggaggcaaggcccagagctccctggggtacatccccctaatgagggtggtgcaatcggtgcgacacacgacgcggaaatccagcaccacgctgcgggagggttgggtggttcattacagcaacaaggacacgctgagaaagcggcactattggcgcctggactgcaagtgtatcacgctcttccagaacaacacgaccaacagatactataaggaaattccgctgtcagaaatcctcacggtggagtccgcccagaacttcagccttgtgccgccgggcaccaacccacactgctttgagatcgtcactgccaatgccacctacttcgtgggcgagatgcctggcgggactccgggtgggccaagtgggcagggggctgaggccgcccggggctgggagacagccatccgccaggccctgatgcccgtcatccttcaggacgcacccagcgccccaggccacgcgccccacagacaagcttctctgagcatctctgtgtccaacagtcagatccaagagaatgtggacattgccactgtctaccagatcttccctgacgaagtgctgggctcagggcagtttggagtggtctatggaggaaaacaccggaagacaggccgggacgtggcagttaaggtcattgacaaactgcgcttccctaccaagcaggagagccagctccggaatgaagtggccattctgcagagcctgcggcatcccgggatcgtgaacctggagtgcatgttcgagacgcctgagaaagtgtttgtggtgatggagaagctgcatggggacatgttggagatgatcctgtccagtgagaagggccggctgcctgagcgcctcaccaagttcctcatcacccagatcctggtggctttgagacaccttcacttcaagaacattgtccactgtgacttgaaaccagaaaacgtgttgctggcatcagcagacccatttcctcaggtgaagctgtgtgactttggctttgctcgcatcatcggcgagaagtcgttccgccgctcagtggtgggcacgccggcctacctggcacccgaggtgctgctcaaccagggctacaaccgctcgctggacatgtggtcagtgggcgtgatcatgtacgtcagcctcagcggcaccttccctttcaacgaggatgaggacatcaatgaccagatccagaacgccgccttcatgtacccggccagcccctggagccacatctcagctggagccattgacctcatcaacaacctgctgcaggtgaagatgcgcaaacgctacagcgtggacaaatctctcagccacccctggttacaggagtaccagacgtggctggacctccgagagctggaggggaagatgggagagcgatacatcacgcatgagagtgacgacgcgcgctgggagcagtttgcagcagagcatccgctgcctgggtctgggctgcccacggacagggatctcggtggggcctgtccaccacaggaccacgacatgcaggggctggcggagcgcatcagtgttctctga

SEQ ID NO: 9286 - RNA, 2637 nt, synthetic construct
  misc_feature 1..2637: note = derived and/or modified sequence opt1 fromPRKD2__Homo_sapiens__CCDS12689.1
  source 1..2637: mol_type = other RNA
atggccaccgcccccagctacccggcgggcctgcccgggtcccccggccccgggagcccgcccccccccggcgggctcgagctgcagtccccgccccccctgctcccccagatcccggcccccggcagcggcgtgtccttccacatccagatcgggctgacccgcgagttcgtcctgctccccgccgccagcgagctggcccacgtgaagcagctggcgtgctccatcgtggaccagaagttccccgagtgcggcttctacgggctctacgacaagatcctgctgttcaagcacgacccgacgagcgccaacctcctgcagctggtccggtccagcggcgacatccaggagggggacctcgtggaggtggtcctgtccgccagcgccaccttcgaggacttccagatccgcccccacgcgctgaccgtgcactcctaccgggcccccgccttctgcgaccactgcggcgagatgctcttcggcctggtgcgccaggggctgaagtgcgacggctgcgggctcaactaccacaagcggtgcgccttcagcatccccaacaactgctccggcgcccgcaagcggcgcctgagctccaccagcctggcgtccggccacagcgtccggctcgggacgagcgagtccctgccgtgcaccgccgaggagctgagccgctccaccaccgagctcctgccccggcgcccccccagctccagctccagctccagcgcctccagctacacgggccggccgatcgagctggacaagatgctcctgtccaaggtgaaggtgccccacaccttcctgatccacagctacacccgccccaccgtctgccaggcctgcaagaagctcctgaaggggctgttccggcagggcctccagtgcaaggactgcaagttcaactgccacaagcgctgcgccacgcgggtgcccaacgactgcctgggggaggcgctgatcaacggcgacgtgccgatggaggaggccaccgacttctccgaggccgacaagagcgccctcatggacgagtccgaggacagcggcgtcatccccgggtcccacagcgagaacgccctgcacgcgagcgaggaggaggagggcgaggggggcaaggcccagtccagcctggggtacatccccctcatgcgcgtggtgcagtccgtccggcacaccacccgcaagagctccacgaccctgcgggagggctgggtggtgcactacagcaacaaggacaccctgcgcaagcgccactactggcggctcgactgcaagtgcatcaccctgttccagaacaacacgaccaaccgctactacaaggagatcccgctgtccgagatcctcaccgtcgagagcgcccagaacttctccctggtgccccccggcaccaacccccactgcttcgagatcgtgacggccaacgccacctacttcgtcggggagatgccgggcgggacccccggcgggcccagcggccagggcgcggaggccgcccgggggtgggagaccgccatccgccaggcgctgatgcccgtgatcctgcaggacgccccgtccgcccccggccacgccccccaccggcaggccagcctctccatcagcgtctccaacagccagatccaggagaacgtggacatcgcgacggtgtaccagatcttccccgacgaggtcctggggtccggccagttcggcgtggtgtacgggggcaagcaccgcaagaccgggcgggacgtcgccgtgaaggtgatcgacaagctgcgcttcccgaccaagcaggagagccagctccggaacgaggtcgccatcctgcagagcctgcgccaccccggcatcgtgaacctcgagtgcatgttcgagacccccgagaaggtgttcgtcgtgatggagaagctgcacggggacatgctggagatgatcctctccagcgagaagggccggctgcccgagcgcctgacgaagttcctcatcacccagatcctggtggccctgcggcacctccacttcaagaacatcgtccactgcgacctgaagccggagaacgtgctgctcgcctccgcggaccccttcccccaggtgaagctgtgcgacttcggcttcgcccgcatcatcggggagaagagcttccggcgctccgtcgtgggcacccccgcctacctggccccggaggtgctcctgaaccaggggtacaaccggagcctggacatgtggtccgtcggcgtgatcatgtacgtgagcctctccgggaccttccccttcaacgaggacgaggacatcaacgaccagatccagaacgccgcgttcatgtaccccgccagcccctggtcccacatcagcgccggcgccatcgacctgatcaacaacctgctccaggtcaagatgcgcaagcggtactccgtggacaagagcctgtcccacccgtggctgcaggagtaccagacgtggctcgacctgcgcgagctggagggcaagatgggggagcgctacatcacccacgagagcgacgacgcgcggtgggagcagttcgccgccgagcaccccctccccggctccgggctgccgaccgaccgcgacctgggcggggcctgccccccccaggaccacgacatgcagggcctcgccgagcggatcagcgtgctgtga

SEQ ID NO: 9287 - RNA, 2637 nt, synthetic construct
  misc_feature 1..2637: note = derived and/or modified sequence opt2 fromPRKD2__Homo_sapiens__CCDS12689.1
  source 1..2637: mol_type = other RNA
atggccaccgccccctcctaccccgccggcctccccggctcccccggccccggctccccccccccccccggcggcctcgagctccagtcccccccccccctcctcccccagatccccgcccccggctccggcgtctccttccacatccagatcggcctcacccgcgagttcgtcctcctccccgccgcctccgagctcgcccacgtcaagcagctcgcctgctccatcgtcgaccagaagttccccgagtgcggcttctacggcctctacgacaagatcctcctcttcaagcacgaccccacctccgccaacctcctccagctcgtccgctcctccggcgacatccaggagggcgacctcgtcgaggtcgtcctctccgcctccgccaccttcgaggacttccagatccgcccccacgccctcaccgtccactcctaccgcgcccccgccttctgcgaccactgcggcgagatgctcttcggcctcgtccgccagggcctcaagtgcgacggctgcggcctcaactaccacaagcgctgcgccttctccatccccaacaactgctccggcgcccgcaagcgccgcctctcctccacctccctcgcctccggccactccgtccgcctcggcacctccgagtccctcccctgcaccgccgaggagctctcccgctccaccaccgagctcctcccccgccgccccccctcctcctcctcctcctcctccgcctcctcctacaccggccgccccatcgagctcgacaagatgctcctctccaaggtcaaggtcccccacaccttcctcatccactcctacacccgccccaccgtctgccaggcctgcaagaagctcctcaagggcctcttccgccagggcctccagtgcaaggactgcaagttcaactgccacaagcgctgcgccacccgcgtccccaacgactgcctcggcgaggccctcatcaacggcgacgtccccatggaggaggccaccgacttctccgaggccgacaagtccgccctcatggacgagtccgaggactccggcgtcatccccggctcccactccgagaacgccctccacgcctccgaggaggaggagggcgagggcggcaaggcccagtcctccctcggctacatccccctcatgcgcgtcgtccagtccgtccgccacaccacccgcaagtcctccaccaccctccgcgagggctgggtcgtccactactccaacaaggacaccctccgcaagcgccactactggcgcctcgactgcaagtgcatcaccctcttccagaacaacaccaccaaccgctactacaaggagatccccctctccgagatcctcaccgtcgagtccgcccagaacttctccctcgtcccccccggcaccaacccccactgcttcgagatcgtcaccgccaacgccacctacttcgtcggcgagatgcccggcggcacccccggcggcccctccggccagggcgccgaggccgcccgcggctgggagaccgccatccgccaggccctcatgcccgtcatcctccaggacgccccctccgcccccggccacgccccccaccgccaggcctccctctccatctccgtctccaactcccagatccaggagaacgtcgacatcgccaccgtctaccagatcttccccgacgaggtcctcggctccggccagttcggcgtcgtctacggcggcaagcaccgcaagaccggccgcgacgtcgccgtcaaggtcatcgacaagctccgcttccccaccaagcaggagtcccagctccgcaacgaggtcgccatcctccagtccctccgccaccccggcatcgtcaacctcgagtgcatgttcgagacccccgagaaggtcttcgtcgtcatggagaagctccacggcgacatgctcgagatgatcctctcctccgagaagggccgcctccccgagcgcctcaccaagttcctcatcacccagatcctcgtcgccctccgccacctccacttcaagaacatcgtccactgcgacctcaagcccgagaacgtcctcctcgcctccgccgaccccttcccccaggtcaagctctgcgacttcggcttcgcccgcatcatcggcgagaagtccttccgccgctccgtcgtcggcacccccgcctacctcgcccccgaggtcctcctcaaccagggctacaaccgctccctcgacatgtggtccgtcggcgtcatcatgtacgtctccctctccggcaccttccccttcaacgaggacgaggacatcaacgaccagatccagaacgccgccttcatgtaccccgcctccccctggtcccacatctccgccggcgccatcgacctcatcaacaacctcctccaggtcaagatgcgcaagcgctactccgtcgacaagtccctctcccacccctggctccaggagtaccagacctggctcgacctccgcgagctcgagggcaagatgggcgagcgctacatcacccacgagtccgacgacgcccgctgggagcagttcgccgccgagcaccccctccccggctccggcctccccaccgaccgcgacctcggcggcgcctgccccccccaggaccacgacatgcagggcctcgccgagcgcatctccgtcctctga

SEQ ID NO: 9288 - RNA, 2637 nt, synthetic construct
  misc_feature 1..2637: note = derived and/or modified sequence opt3 fromPRKD2__Homo_sapiens__CCDS12689.1
  source 1..2637: mol_type = other RNA
atggccaccgctcccagctaccctgcaggcctgccagggtccccgggacccggttctcctccaccccctggcgggctcgagcttcagtcaccaccccctctgttgccacaaatcccggcccccggaagtggcgtgagcttccacattcagataggtttaacaagagaatttgtcctgctacctgcggcttccgagctcgcccatgttaagcagctggcatgctctatcgtggaccagaaattcccagaatgtgggttttatggactttacgataagattctgttgttcaaacacgaccccacttcggccaacctcctgcaactggtaaggtcaagcggcgatatccaggagggcgacctcgtggaagtcgtgttaagtgcttccgcaacgtttgaggatttccagattcggcctcatgccctgaccgttcactcttatcgcgctccagccttttgcgaccattgtggggagatgcttttcggattggtgcgacagggtctgaagtgcgatggctgtgggctaaattaccacaaacgttgcgcgtttagcatccccaacaattgttccggagcaagaaagaggcggctctcaagtacaagcctggcctctggccactccgtccgccttggtacttcagaaagcctgccgtgcaccgctgaggaattgagtagatctacaaccgagctcctgcctaggcggcccccatccagctcgtcttcctcaagtgccagctcctatactgggcgccctatagagttagacaagatgctgctctctaaagtgaaggtaccccatacattccttatccacagctacacccgaccaacggtttgtcaagcatgcaaaaagctgttgaaaggactatttagacagggcctgcagtgtaaggattgcaagttcaactgccataaaaggtgtgctactcgggtgcccaatgactgcctcggcgaagccctgattaacggggatgtccctatggaggaagcgaccgacttttcagaggccgataagagtgcacttatggacgaatccgaggacagcggagtgatcccaggttctcactcagagaatgctctgcacgccagtgaagaggaagagggcgaagggggaaaagctcagagctccttgggctatattccgctcatgcgtgtggtccaatctgttcgccatacaactagaaagtcgagcaccacactgagggagggttgggtggtacactactccaacaaagataccttacggaagcgacattactggcgcctggactgtaaatgcatcacgctattccagaataacactacaaatagatattacaaggagatacccctctcagaaattctgaccgtggagagtgcccagaacttctctcttgtccctccagggactaatccccactgttttgaaatcgtgacagcaaacgccacctatttcgttggcgagatgcctggaggcacgccagggggacccagcggtcaaggcgctgaagcggcaagggggtgggagaccgccattcggcaggctttgatgccggtgatcctgcaggatgccccttccgcaccaggacatgctccccaccgccaggcctcactcagcatctctgtctccaatagtcaaattcaggagaacgtggacatagccacagtataccagatctttcctgatgaagttctgggcagcggtcagttcggggtggtctatggcggaaagcacagaaaaactggcagggacgtggcagtcaaggtgattgataaacttcgttttcccaccaagcaagagtctcagctgcggaacgaagttgcgatcttgcagtccctccgacatccagggatagtgaatctggagtgcatgttcgagacacctgaaaaagtatttgtcgtgatggagaagttacacggagacatgctggaaatgattctatcaagtgagaagggtagactccccgaaaggctgactaaattccttatcacccagatcttggttgctctgcgccatctccactttaagaacattgtgcactgtgatctgaaaccagagaatgtcttactggccagcgcagacccgttccctcaagtgaaactttgcgattttggcttcgcccggatcattggggagaagtcgtttagaaggtccgtagtgggaacacccgcttacttggccccagaagttctcctgaaccagggctataatcgctctctagacatgtggagcgtcggtgtgataatgtacgtgtcactgagtgggaccttccccttcaacgaggacgaagatatcaatgaccagattcagaacgcagcttttatgtaccctgcctccccatggtctcatatcagcgcgggcgccatcgatctcattaataacctgcttcaagtcaagatgcgaaagcggtattccgttgacaaatcattgagccacccctggctgcaggagtaccagacttggttagatctccgtgaactggagggaaagatgggcgagagatatataacgcatgaaagtgacgatgctaggtgggagcaattcgcagccgaacaccctcttccggggtctggactgccaacagaccgcgatttgggcggtgcttgtccccctcaggaccatgatatgcaggggctcgccgagcggatctccgtgctgtga

SEQ ID NO: 9289 - RNA, 2637 nt, synthetic construct
  misc_feature 1..2637: note = derived and/or modified sequence opt4 fromPRKD2__Homo_sapiens__CCDS12689.1
  source 1..2637: mol_type = other RNA
atggccaccgcccccagctaccccgccggcctgcccggcagccccggccccggcagcccccccccccccggcggcctggagctgcagagccccccccccctgctgccccagatccccgcccccggcagcggcgtgagcttccacatccagatcggcctgaccagagagttcgtgctgctgcccgccgccagcgagctggcccacgtgaagcagctggcctgcagcatcgtggaccagaagttccccgagtgcggcttctacggcctgtacgacaagatcctgctgttcaagcacgaccccaccagcgccaacctgctgcagctggtgagaagcagcggcgacatccaggagggcgacctggtggaggtggtgctgagcgccagcgccaccttcgaggacttccagatcagaccccacgccctgaccgtgcacagctacagagcccccgccttctgcgaccactgcggcgagatgctgttcggcctggtgagacagggcctgaagtgcgacggctgcggcctgaactaccacaagagatgcgccttcagcatccccaacaactgcagcggcgccagaaagagaagactgagcagcaccagcctggccagcggccacagcgtgagactgggcaccagcgagagcctgccctgcaccgccgaggagctgagcagaagcaccaccgagctgctgcccagaagaccccccagcagcagcagcagcagcagcgccagcagctacaccggcagacccatcgagctggacaagatgctgctgagcaaggtgaaggtgccccacaccttcctgatccacagctacaccagacccaccgtgtgccaggcctgcaagaagctgctgaagggcctgttcagacagggcctgcagtgcaaggactgcaagttcaactgccacaagagatgcgccaccagagtgcccaacgactgcctgggcgaggccctgatcaacggcgacgtgcccatggaggaggccaccgacttcagcgaggccgacaagagcgccctgatggacgagagcgaggacagcggcgtgatccccggcagccacagcgagaacgccctgcacgccagcgaggaggaggagggcgagggcggcaaggcccagagcagcctgggctacatccccctgatgagagtggtgcagagcgtgagacacaccaccagaaagagcagcaccaccctgagagagggctgggtggtgcactacagcaacaaggacaccctgagaaagagacactactggagactggactgcaagtgcatcaccctgttccagaacaacaccaccaacagatactacaaggagatccccctgagcgagatcctgaccgtggagagcgcccagaacttcagcctggtgccccccggcaccaacccccactgcttcgagatcgtgaccgccaacgccacctacttcgtgggcgagatgcccggcggcacccccggcggccccagcggccagggcgccgaggccgccagaggctgggagaccgccatcagacaggccctgatgcccgtgatcctgcaggacgcccccagcgcccccggccacgccccccacagacaggccagcctgagcatcagcgtgagcaacagccagatccaggagaacgtggacatcgccaccgtgtaccagatcttccccgacgaggtgctgggcagcggccagttcggcgtggtgtacggcggcaagcacagaaagaccggcagagacgtggccgtgaaggtgatcgacaagctgagattccccaccaagcaggagagccagctgagaaacgaggtggccatcctgcagagcctgagacaccccggcatcgtgaacctggagtgcatgttcgagacccccgagaaggtgttcgtggtgatggagaagctgcacggcgacatgctggagatgatcctgagcagcgagaagggcagactgcccgagagactgaccaagttcctgatcacccagatcctggtggccctgagacacctgcacttcaagaacatcgtgcactgcgacctgaagcccgagaacgtgctgctggccagcgccgaccccttcccccaggtgaagctgtgcgacttcggcttcgccagaatcatcggcgagaagagcttcagaagaagcgtggtgggcacccccgcctacctggcccccgaggtgctgctgaaccagggctacaacagaagcctggacatgtggagcgtgggcgtgatcatgtacgtgagcctgagcggcaccttccccttcaacgaggacgaggacatcaacgaccagatccagaacgccgccttcatgtaccccgccagcccctggagccacatcagcgccggcgccatcgacctgatcaacaacctgctgcaggtgaagatgagaaagagatacagcgtggacaagagcctgagccacccctggctgcaggagtaccagacctggctggacctgagagagctggagggcaagatgggcgagagatacatcacccacgagagcgacgacgccagatgggagcagttcgccgccgagcaccccctgcccggcagcggcctgcccaccgacagagacctgggcggcgcctgccccccccaggaccacgacatgcagggcctggccgagagaatcagcgtgctgtga

SEQ ID NO: 9290 - RNA, 2637 nt, synthetic construct
  misc_feature 1..2637: note = derived and/or modified sequence opt5 fromPRKD2__Homo_sapiens__CCDS12689.1
  source 1..2637: mol_type = other RNA
atggccaccgctcccagctaccctgccggcctgccggggtcccccggacctggctctccccctccccctgggggactcgagctgcagagcccgccccctcttctgccccaaatccctgcgcccggctccggggtgtctttccacattcagatcggactcacaagagaatttgtcctgcttccggctgccagcgagctggcccatgttaagcagctcgcttgctccattgtggaccagaaattccctgaatgtggcttttatggcctgtacgataagatcctcctgttcaaacacgaccccacgtctgccaacctgcttcaactggtgcggagctccggggatattcaggagggagacctcgtcgaagtggttctgagcgcttctgccacctttgaggatttccagatccgccctcatgcgcttacagtgcactcctatagagcccccgctttttgcgaccattgtggcgagatgctgttcgggctcgtccggcagggactgaagtgcgatggctgtgggctgaattaccacaaacgctgcgcctttagcatccccaacaattgttctggagctagaaagcggcgcctctccagcacctctctggcctccggccacagcgtgagacttggcacatccgaatctctgccttgcaccgcggaggaactcagccggtccacaaccgagctgcttccgcgcagaccccctagcagctccagctctagctccgcctctagctatacggggcggcccattgagctggacaagatgctcctgtccaaagttaaggtgcctcataccttcctgatccacagctacacacgccccaccgtctgtcaggcttgcaaaaagctcctgaaaggactttttagacaaggcctgcagtgtaaggattgcaagttcaactgccataaacggtgtgccacacgcgtgccgaatgactgcctcggggaagctctgattaacggagatgtgcctatggaggaagccaccgacttttctgaggccgataagtccgctcttatggacgaaagcgaggactctggcgtcatccccgggtcccacagcgagaatgcgctgcacgcctccgaagaggaagagggagaaggcggcaaagctcagtctagcctcgggtatattcctctgatgagagttgtgcaatccgtgcggcatacgacaagaaagtctagcaccacactgcgcgagggatgggtcgtgcactactccaacaaagataccctccggaagagacattactggcgcctggactgtaaatgcatcacccttttccagaataacacaacgaatcggtattacaaggagattcccctgagcgaaatcctcaccgttgagtctgcccagaacttctccctggtgcctcccggcacaaatccgcactgttttgaaatcgtcaccgccaacgctacatatttcgtgggggagatgcctggaggcacccccgggggccccagcggacaaggcgccgaagcggctagagggtgggagacggccattcgccaggccctgatgcctgttatccttcaggatgctccgtctgcccccggacatgctcctcaccggcaggcctccctcagcatttctgtgagcaattcccaaatccaggagaacgtcgacattgcgacagtgtaccagatctttcccgatgaagtcctgggcagcgggcagttcggagtggtttatggcgggaagcacagaaaaaccggccgcgacgtggccgtcaaggtgatcgataaactgcggtttcctaccaagcaagagtctcagctcagaaacgaagttgctattctgcagtcccttcgccatcccggaatcgtgaatctggagtgcatgttcgagacacctgaaaaagtctttgtggtgatggagaagctccacggcgacatgctggaaatgattctgagctccgagaaggggcggcttcccgaaagactcaccaaattcctgatcacacagattctggttgccctccggcatctgcactttaagaacatcgtccactgtgatcttaaaccggagaatgtgctgctcgcttctgccgaccctttcccccaagtgaagctgtgcgattttggattcgcgcgcatcattggcgagaaatcttttagacggtccgtcgtggggacgcctgcctacctggctcccgaagttcttctcaaccagggatataatagatctctggacatgtggagcgtgggcgtcatcatgtacgtgtccctgtctgggaccttcccgttcaacgaggacgaagatattaatgaccagatccagaacgccgcttttatgtaccctgccagcccctggtcccatattagcgccggcgctatcgatctcattaataacctgcttcaagttaagatgcgcaagcggtattctgtggacaaatccctgagccacccttggctccaggagtaccagacatggctggatctgagagaacttgagggaaagatgggcgagcgctatatcacccatgaatctgacgatgcgagatgggagcaattcgccgctgaacaccccctccccgggtccggactgcctacagaccgggatctgggcggggcctgtccgccccaggaccatgatatgcagggactcgccgagcgcatcagcgtcctgtga

SEQ ID NO: 9291 - protein, 562 aa, synthetic construct
  REGION 1..562: note = Rab__Homo_sapiens__P52594
MAASAKRKQEEKHLKMLRDMTGLPHNRKCFDCDQRGPTYVNMTVGSFVCTSCSGSLRGLNPPHRVKSISMTTFTQQEIEFLQKHGNEVCKQIWLGLFDDRSSAIPDFRDPQKVKEFLQEKYEKKRWYVPPEQAKVVASVHASISGSSASSTSSTPEVKPLKSLLGDSAPTLHLNKGTPSQSPVVGRSQGQQQEKKQFDLLSDLGSDIFAAPAPQSTATANFANFAHFNSHAAQNSANADFANFDAFGQSSGSSNFGGFPTASHSPFQPQTTGGSAASVNANFAHFDNFPKSSSADFGTFNTSQSHQTASAVSKVSTNKAGLQTADKYAALANLDNIFSAGQGGDQGSGFGTTGKAPVGSVVSVPSQSSASSDKYAALAELDSVFSSAATSSNAYTSTSNASSNVFGTVPVVASAQTQPASSSVPAPFGATPSTNPFVAAAGPSVASSTNPFQTNARGATAATFGTASMSMPTGFGTPAPYSLPTSFSGSFQQPAFPAQAAFPQQTAFSQQPNGAGFAAFGQTKPVVTPFGQVAAAGVSSNPFMTGAPTGQFPTGSSSTNPFL

SEQ ID NO: 9292 - RNA, 1689 nt, synthetic construct
  misc_feature 1..1689: note = Rab__Homo_sapiens__AAC37580
  source 1..1689: mol_type = other RNA
atggcggccagcgcgaagcggaagcaggaggagaagcacctgaagatgctgcgggacatgaccggcctcccgcacaaccgaaagtgcttcgactgcgaccagcgcggccccacctacgttaacatgacggtcggctccttcgtgtgtacctcctgctccggcagcctgcgaggattaaatccaccacacagggtgaaatctatctccatgacaacattcacacaacaggaaattgaattcttacaaaaacatggaaatgaagtctgtaaacagatttggctaggattatttgatgatagatcttcagcaattccagacttcagggatccacaaaaagtgaaagagtttctacaagaaaagtatgaaaagaaaagatggtatgtcccgccagaacaagccaaagtcgtggcatcagttcatgcatctatttcagggtcctctgccagtagcacaagcagcacacctgaggtcaaaccactgaaatctcttttaggggattctgcaccaacactgcacttaaataagggcacacctagtcagtccccagttgtaggtcgttctcaagggcagcagcaggagaagaagcaatttgaccttttaagtgatctcggctcagacatctttgctgctccagctcctcagtcaacagctacagccaattttgctaactttgcacatttcaacagtcatgcagctcagaattctgcaaatgcagattttgcaaactttgatgcatttggacagtctagtggttcgagtaattttggaggtttccccacagcaagtcactctccttttcagccccaaactacaggtggaagtgctgcatcagtaaatgctaattttgctcattttgataacttccccaaatcctccagtgctgattttggaaccttcaatacttcccagagtcatcaaacagcatcagctgttagtaaagtttcaacgaacaaagctggtttacagactgcagacaaatatgcagcacttgctaatttagacaatatcttcagtgccgggcaaggtggtgatcagggaagtggctttgggaccacaggtaaagctcctgttggttctgtggtttcagttcccagtcagtcaagtgcatcttcagacaagtatgcagctctggcagaactagacagcgttttcagttctgcagccacctccagtaatgcgtatacttccacaagtaatgctagcagcaatgtttttggaacagtgccagtggttgcttctgcacagacacagcctgcttcatcaagtgtgcctgctccatttggagctacgccttccacaaatccatttgttgctgctgctggtccttctgtggcatcttctacaaacccatttcagaccaatgccagaggagcaacagcggcaacctttggcactgcatccatgagcatgcccacgggattcggcactcctgctccctacagtcttcccaccagctttagtggcagctttcagcagcctgcctttccagcccaagcagctttccctcaacagacagctttttctcaacagcccaatggtgcaggttttgcagcatttggacaaacaaagccagtagtaaccccttttggtcaagttgcagctgctggagtatctagtaatccttttatgactggtgcaccaacaggacaatttccaacaggaagctcatcaaccaatcctttcttatag

SEQ ID NO: 9293 - RNA, 1689 nt, synthetic construct
  misc_feature 1..1689: note = derived and/or modified sequence opt1 fromRab__Homo_sapiens__AAC37580
  source 1..1689: mol_type = other RNA
atggccgccagcgcgaagcgcaagcaggaggagaagcacctgaagatgctccgggacatgaccggcctgccccacaaccgcaagtgcttcgactgcgaccagcgggggccgacctacgtgaacatgacggtcggctccttcgtgtgcaccagctgctccgggagcctgcgcggcctcaacccgccccaccgggtgaagtccatcagcatgaccaccttcacgcagcaggagatcgagttcctgcagaagcacgggaacgaggtctgcaagcagatctggctgggcctcttcgacgaccgctccagcgccatccccgacttccgggacccccagaaggtgaaggagttcctgcaggagaagtacgagaagaagcgctggtacgtgccgcccgagcaggccaaggtcgtggcctccgtgcacgccagcatctccggcagctccgcgagctccaccagctccacccccgaggtcaagcccctcaagagcctgctgggggactccgcccccaccctgcacctcaacaagggcacgcccagccagagccccgtggtggggcggtcccagggccagcagcaggagaagaagcagttcgacctgctgagcgacctcgggtccgacatcttcgccgccccggcgccccagagcaccgccaccgccaacttcgccaacttcgcccacttcaactcccacgcggcccagaacagcgccaacgccgacttcgccaacttcgacgcgttcggccagtccagcggctccagcaacttcgggggcttccccaccgcctcccacagccccttccagccgcagacgaccgggggctccgccgccagcgtcaacgccaacttcgcgcacttcgacaacttccccaagtccagctccgccgacttcggcaccttcaacaccagccagtcccaccagacggccagcgccgtgagcaaggtgtccaccaacaaggccgggctgcagaccgcggacaagtacgccgccctggccaacctcgacaacatcttcagcgcgggccagggcggggaccaggggtccggcttcggcaccacggggaaggcccccgtcggcagcgtggtgtccgtccccagccagtccagcgcctccagcgacaagtacgccgccctggcggagctggactccgtgttcagctccgccgccaccagctccaacgcctacaccagcacctccaacgccagcagcaacgtgttcgggacggtcccggtggtggcgtccgcccagacccagcccgccagctccagcgtccccgcccccttcggcgccaccccgtccaccaaccccttcgtggcggccgccgggcccagcgtcgcctccagcacgaaccccttccagaccaacgcgcgcggcgccaccgccgccaccttcggcacggcctccatgagcatgccgaccgggttcggcacccccgcgccctactccctcccgaccagcttctccgggagcttccagcagcccgccttccccgcccaggccgccttcccccagcagacggcgttctcccagcagccgaacggcgccgggttcgccgccttcggccagaccaagcccgtggtgacccccttcggccaggtcgccgcggccggggtgagctccaaccccttcatgaccggcgccccgaccgggcagttccccacgggcagctccagcaccaaccccttcctgtga

SEQ ID NO: 9294 - RNA, 1689 nt, synthetic construct
  misc_feature 1..1689: note = derived and/or modified sequence opt2 fromRab__Homo_sapiens__AAC37580
  source 1..1689: mol_type = other RNA
atggccgcctccgccaagcgcaagcaggaggagaagcacctcaagatgctccgcgacatgaccggcctcccccacaaccgcaagtgcttcgactgcgaccagcgcggccccacctacgtcaacatgaccgtcggctccttcgtctgcacctcctgctccggctccctccgcggcctcaaccccccccaccgcgtcaagtccatctccatgaccaccttcacccagcaggagatcgagttcctccagaagcacggcaacgaggtctgcaagcagatctggctcggcctcttcgacgaccgctcctccgccatccccgacttccgcgacccccagaaggtcaaggagttcctccaggagaagtacgagaagaagcgctggtacgtcccccccgagcaggccaaggtcgtcgcctccgtccacgcctccatctccggctcctccgcctcctccacctcctccacccccgaggtcaagcccctcaagtccctcctcggcgactccgcccccaccctccacctcaacaagggcaccccctcccagtcccccgtcgtcggccgctcccagggccagcagcaggagaagaagcagttcgacctcctctccgacctcggctccgacatcttcgccgcccccgccccccagtccaccgccaccgccaacttcgccaacttcgcccacttcaactcccacgccgcccagaactccgccaacgccgacttcgccaacttcgacgccttcggccagtcctccggctcctccaacttcggcggcttccccaccgcctcccactcccccttccagccccagaccaccggcggctccgccgcctccgtcaacgccaacttcgcccacttcgacaacttccccaagtcctcctccgccgacttcggcaccttcaacacctcccagtcccaccagaccgcctccgccgtctccaaggtctccaccaacaaggccggcctccagaccgccgacaagtacgccgccctcgccaacctcgacaacatcttctccgccggccagggcggcgaccagggctccggcttcggcaccaccggcaaggcccccgtcggctccgtcgtctccgtcccctcccagtcctccgcctcctccgacaagtacgccgccctcgccgagctcgactccgtcttctcctccgccgccacctcctccaacgcctacacctccacctccaacgcctcctccaacgtcttcggcaccgtccccgtcgtcgcctccgcccagacccagcccgcctcctcctccgtccccgcccccttcggcgccaccccctccaccaaccccttcgtcgccgccgccggcccctccgtcgcctcctccaccaaccccttccagaccaacgcccgcggcgccaccgccgccaccttcggcaccgcctccatgtccatgcccaccggcttcggcacccccgccccctactccctccccacctccttctccggctccttccagcagcccgccttccccgcccaggccgccttcccccagcagaccgccttctcccagcagcccaacggcgccggcttcgccgccttcggccagaccaagcccgtcgtcacccccttcggccaggtcgccgccgccggcgtctcctccaaccccttcatgaccggcgcccccaccggccagttccccaccggctcctcctccaccaaccccttcctctga

SEQ ID NO: 9295 - RNA, 1689 nt, synthetic construct
  misc_feature 1..1689: note = derived and/or modified sequence opt3 fromRab__Homo_sapiens__AAC37580
  source 1..1689: mol_type = other RNA
atggccgctagcgcaaagagaaaacaggaggaaaagcacctgaaaatgctcagggacatgaccggccttccccataaccggaagtgcttcgattgtgaccaacgcgggcctacatacgtgaatatgactgtcggatcctttgtttgcacgtcttgttcaggtagtctgcgaggcttgaacccaccgcaccgtgtgaaaagcatctccatgaccacattcactcagcaggagattgaatttttacagaagcatgggaatgaggtatgcaagcaaatatggctgggactattcgatgacagatcttcggccatccccgattttagggaccctcagaaagtgaaggagttcctccaggaaaaatatgagaagaaacggtggtacgtcccacccgaacaggcgaaggtggttgcttcagtgcacgccagcattagtggctcctctgcaagctccacctcaagtacacctgaggtcaagccactgaaaagccttctgggtgattctgcccccaccttgcatctcaacaaggggactccttcccaatcaccagtggtaggacgcagccagggccagcagcaagagaaaaagcagtttgacctgctgagtgatctcggctctgacatcttcgctgcaccggctccccagtccacagccaccgccaattttgcgaacttcgcacactttaatagccacgccgctcaaaactcggccaatgcagatttcgctaactttgacgccttcgggcagtcttccggatcaagtaatttcggtggctttcctacggcgagccattccccattccagccccagactaccgggggatctgccgcaagcgttaacgctaattttgcccacttcgataactttcctaaatcaagttccgctgacttcggcacatttaatactagccaatctcatcagaccgcctcagcagtgagtaaggtcagcacaaacaaagccggtttacagaccgctgacaagtatgcggcactggccaaccttgataatattttctccgctgggcagggaggcgaccaaggctctgggtttggaacgactggtaaggccccagtgggctcggtggtcagcgttccctcccagtcaagtgcatctagcgataaatacgccgctttggccgaactggactccgtgttctcaagcgcagcgacatcttccaacgcttataccagtactagcaatgcctcttccaacgtatttgggacagtgccggtcgtggcatcagcccagacccagcctgctagtagctcggttcccgccccattcggagcaacgccttccaccaatccctttgtggctgccgcgggcccatctgtcgccagctcaacaaaccccttccaaactaatgctagaggtgcaaccgccgctacattcgggactgccagtatgtccatgcctaccggctttggaacaccagcaccgtactctctacccaccagcttctccggctcatttcagcagcctgcgttcccagcccaggctgcctttccccaacagactgcattcagccagcaacctaacggggctggatttgccgcattcggtcagacgaagccagtggtaacaccctttggccaggttgccgctgcgggggtgagttctaatccgttcatgaccggagcccctactggccagtttccaaccggttccagctcgacaaaccccttcctctga

SEQ ID NO: 9296 - RNA, 1689 nt, synthetic construct
  misc_feature 1..1689: note = derived and/or modified sequence opt4 fromRab__Homo_sapiens__AAC37580
  source 1..1689: mol_type = other RNA
atggccgccagcgccaagagaaagcaggaggagaagcacctgaagatgctgagagacatgaccggcctgccccacaacagaaagtgcttcgactgcgaccagagaggccccacctacgtgaacatgaccgtgggcagcttcgtgtgcaccagctgcagcggcagcctgagaggcctgaaccccccccacagagtgaagagcatcagcatgaccaccttcacccagcaggagatcgagttcctgcagaagcacggcaacgaggtgtgcaagcagatctggctgggcctgttcgacgacagaagcagcgccatccccgacttcagagacccccagaaggtgaaggagttcctgcaggagaagtacgagaagaagagatggtacgtgccccccgagcaggccaaggtggtggccagcgtgcacgccagcatcagcggcagcagcgccagcagcaccagcagcacccccgaggtgaagcccctgaagagcctgctgggcgacagcgcccccaccctgcacctgaacaagggcacccccagccagagccccgtggtgggcagaagccagggccagcagcaggagaagaagcagttcgacctgctgagcgacctgggcagcgacatcttcgccgcccccgccccccagagcaccgccaccgccaacttcgccaacttcgcccacttcaacagccacgccgcccagaacagcgccaacgccgacttcgccaacttcgacgccttcggccagagcagcggcagcagcaacttcggcggcttccccaccgccagccacagccccttccagccccagaccaccggcggcagcgccgccagcgtgaacgccaacttcgcccacttcgacaacttccccaagagcagcagcgccgacttcggcaccttcaacaccagccagagccaccagaccgccagcgccgtgagcaaggtgagcaccaacaaggccggcctgcagaccgccgacaagtacgccgccctggccaacctggacaacatcttcagcgccggccagggcggcgaccagggcagcggcttcggcaccaccggcaaggcccccgtgggcagcgtggtgagcgtgcccagccagagcagcgccagcagcgacaagtacgccgccctggccgagctggacagcgtgttcagcagcgccgccaccagcagcaacgcctacaccagcaccagcaacgccagcagcaacgtgttcggcaccgtgcccgtggtggccagcgcccagacccagcccgccagcagcagcgtgcccgcccccttcggcgccacccccagcaccaaccccttcgtggccgccgccggccccagcgtggccagcagcaccaaccccttccagaccaacgccagaggcgccaccgccgccaccttcggcaccgccagcatgagcatgcccaccggcttcggcacccccgccccctacagcctgcccaccagcttcagcggcagcttccagcagcccgccttccccgcccaggccgccttcccccagcagaccgccttcagccagcagcccaacggcgccggcttcgccgccttcggccagaccaagcccgtggtgacccccttcggccaggtggccgccgccggcgtgagcagcaaccccttcatgaccggcgcccccaccggccagttccccaccggcagcagcagcaccaaccccttcctgtga

SEQ ID NO: 9297 - RNA, 1689 nt, synthetic construct
  misc_feature 1..1689: note = derived and/or modified sequence opt5 fromRab__Homo_sapiens__AAC37580
  source 1..1689: mol_type = other RNA
atggccgctagcgccaagagaaaacaggaggaaaagcacctgaaaatgctccgggacatgaccggcctgccccataaccgcaagtgcttcgattgtgaccaaagagggcctacatacgtgaatatgacggtcggatcctttgtttgcacctcttgtagcggctcccttcgggggctgaacccgccccaccgcgtgaaatctatcagcatgacaaccttcacacagcaggagattgaatttctccagaagcatggaaatgaggtgtgcaagcaaatctggctgggccttttcgatgacagatcctctgcgattcctgattttcgggacccccagaaagtcaaggagttcctgcaggaaaaatatgagaagaaacgctggtacgtgcctcccgaacaggctaaggttgtggccagcgtccacgcctccatcagcgggtcttccgctagctctacctccagcacacctgaggtgaagccgctcaaatctctgctgggagattccgcccccaccctccatctgaacaagggcacgcctagccaatcccccgttgtgggcagatctcaggggcagcagcaagagaaaaagcagtttgaccttctgagcgatctcggatccgacattttcgctgcccctgcgccccagagcaccgccacagctaattttgccaacttcgctcactttaattctcacgccgcgcaaaactccgccaatgctgatttcgccaactttgacgctttcggccagagctctgggagctccaatttcggaggctttccgaccgcctctcatagccctttccagccccagacaaccgggggatccgccgctagcgtcaacgcgaattttgcccacttcgataactttcctaaatcttccagcgctgacttcggcacgtttaatacatctcaatcccatcagaccgccagcgccgtgtccaaggtgtctacaaacaaagctggcctgcagaccgccgacaagtatgcggctcttgccaacctggataatatcttcagcgccgggcagggaggcgaccaagggtccggatttggcaccacagggaaggctcccgtcggatctgttgtgagcgtgccctcccagagctctgcctccagcgataaatacgctgccctcgcggaactggactctgtcttctccagcgccgctacgtctagcaacgcctatacctccacaagcaatgcttcttccaacgtgtttggcaccgttcctgtggtcgccagcgcgcagacacagccggcctcctctagcgtgcccgctcctttcggcgccaccccctccacgaatccttttgttgctgccgccgggccctctgtggctagctccacaaacccgttccaaaccaatgcgcggggagccaccgctgccacattcggcaccgcctctatgagcatgcctacagggtttggaacgcccgctccttactccctgcccaccagcttctctggctcctttcagcagcctgccttccccgcgcaggctgcctttccgcaacagacagccttcagccagcaacctaacggggctggctttgccgcgttcggacagaccaagcccgtcgtgacaccctttggccaggtcgctgccgccggggtgtcttccaatcctttcatgaccggagctccgacgggccagtttcccaccgggtctagctccacaaaccctttcctctga

SEQ ID NO: 9298 - protein, 211 aa, synthetic construct
  REGION 1..211: note = Rac1__Homo_sapiens__A4D2P0
MQAIKCVVVGDGAVGKTCLLISYTTNAFPGEYIPTVFDNYSANVMVDGKPVNLGLWDTAGQEDYDRLRPLSYPQTVGETYGKDITSRGKDKPIADVFLICFSLVSPASFENVRAKWYPEVRHHCPNTPIILVGTKLDLRDDKDTIEKLKEKKLTPITYPQGLAMAKEIGAVKYLECSALTQRGLKTVFDEAIRAVLCPPPVKKRKRKCLLL

SEQ ID NO: 9299 - RNA, 636 nt, synthetic construct
  misc_feature 1..636: note = Rac1__Homo_sapiens__BAF84504
  source 1..636: mol_type = other RNA
atgcaggccatcaagtgtgtggtggtgggagacggagctgtaggtaaaacttgcctactgatcagttacacaaccaatgcatttcctggagaatatatccctactgtctttgacaattattctgccaatgttatggtagatggaaaaccggtgaatctgggcttatgggatacagctggacaagaagattatgacagattacgccccctatcctatccgcaaacagttggagaaacgtacggtaaggatataacctcccggggcaaagacaagccgattgccgatgtgttcttaatttgcttttcccttgtgagtcctgcatcatttgaaaatgtccgtgcaaagtggtatcctgaggtgcggcaccactgtcccaacactcccatcatcctagtgggaactaaacttgatcttagggatgataaagacacgatcgagaaactgaaggagaagaagctgactcccatcacctatccgcagggtctagccatggctaaggagattggtgctgtaaaatacctggagtgctcggcgctcacacagcgaggcctcaagacagtgtttgacgaagcgatccgagcagtcctctgcccgcctcccgtgaagaagaggaagagaaaatgcctgctgttgtaa

SEQ ID NO: 9300 - RNA, 636 nt, synthetic construct
  misc_feature 1..636: note = derived and/or modified sequence opt1 fromRac1__Homo_sapiens__BAF84504
  source 1..636: mol_type = other RNA
atgcaggccatcaagtgcgtggtcgtgggcgacggggccgtgggcaagacctgcctgctcatcagctacaccacgaacgcgttccccggggagtacatccccaccgtcttcgacaactactccgccaacgtgatggtggacggcaagcccgtcaacctggggctgtgggacaccgccggccaggaggactacgaccgcctccggcccctgagctacccccagaccgtgggcgagacgtacgggaaggacatcacctcccgcggcaaggacaagccgatcgccgacgtgttcctgatctgcttcagcctcgtctcccccgccagcttcgagaacgtgcgggcgaagtggtaccccgaggtgcgccaccactgccccaacaccccgatcatcctggtcgggaccaagctggacctccgggacgacaaggacacgatcgagaagctgaaggagaagaagctgacccccatcacctacccccagggcctcgccatggccaaggagatcggggccgtgaagtacctggagtgctccgcgctgacccagcgcggcctcaagacggtgttcgacgaggccatccgggccgtcctgtgcccgccgcccgtgaagaagcgcaagcggaagtgcctgctcctgtga

SEQ ID NO: 9301 - RNA, 636 nt, synthetic construct
  misc_feature 1..636: note = derived and/or modified sequence opt2 fromRac1__Homo_sapiens__BAF84504
  source 1..636: mol_type = other RNA
atgcaggccatcaagtgcgtcgtcgtcggcgacggcgccgtcggcaagacctgcctcctcatctcctacaccaccaacgccttccccggcgagtacatccccaccgtcttcgacaactactccgccaacgtcatggtcgacggcaagcccgtcaacctcggcctctgggacaccgccggccaggaggactacgaccgcctccgccccctctcctacccccagaccgtcggcgagacctacggcaaggacatcacctcccgcggcaaggacaagcccatcgccgacgtcttcctcatctgcttctccctcgtctcccccgcctccttcgagaacgtccgcgccaagtggtaccccgaggtccgccaccactgccccaacacccccatcatcctcgtcggcaccaagctcgacctccgcgacgacaaggacaccatcgagaagctcaaggagaagaagctcacccccatcacctacccccagggcctcgccatggccaaggagatcggcgccgtcaagtacctcgagtgctccgccctcacccagcgcggcctcaagaccgtcttcgacgaggccatccgcgccgtcctctgccccccccccgtcaagaagcgcaagcgcaagtgcctcctcctctga

SEQ ID NO: 9302 - RNA, 636 nt, synthetic construct
  misc_feature 1..636: note = derived and/or modified sequence opt3 fromRac1__Homo_sapiens__BAF84504
  source 1..636: mol_type = other RNA
atgcaggccatcaagtgcgtggtcgttggcgacggggctgtgggaaaaacctgtctgctcattagctacacaactaacgcattccccggtgagtatatacctacggtatttgataattactccgccaacgtgatggtcgacggcaagccagtgaatcttgggctgtgggataccgcgggacaagaagactatgatagattgaggccgttatcttacccccagacagttggcgagacttatggtaaagacatcacctcacgggggaaggataaacctattgctgacgtgttcctgatctgctttagtctagtcagcccagcctccttcgaaaacgtgcgcgcaaagtggtaccccgaggtacgacaccattgtcctaatacaccaattatcctcgttggaaccaagctggatcttcgtgacgataaagacactatagaaaagctgaaagagaagaaattgacacccatcacctatcctcagggcctcgccatggctaaggagattggcgcagtgaagtacctggaatgctctgccctgacgcagagagggctcaaaactgtctttgatgaggctatcagggccgtgttatgtccaccgcccgtgaagaaacggaagcgcaaatgcctgcttttgtga

SEQ ID NO: 9303 - RNA, 636 nt, synthetic construct
  misc_feature 1..636: note = derived and/or modified sequence opt4 fromRac1__Homo_sapiens__BAF84504
  source 1..636: mol_type = other RNA
atgcaggccatcaagtgcgtggtggtgggcgacggcgccgtgggcaagacctgcctgctgatcagctacaccaccaacgccttccccggcgagtacatccccaccgtgttcgacaactacagcgccaacgtgatggtggacggcaagcccgtgaacctgggcctgtgggacaccgccggccaggaggactacgacagactgagacccctgagctacccccagaccgtgggcgagacctacggcaaggacatcaccagcagaggcaaggacaagcccatcgccgacgtgttcctgatctgcttcagcctggtgagccccgccagcttcgagaacgtgagagccaagtggtaccccgaggtgagacaccactgccccaacacccccatcatcctggtgggcaccaagctggacctgagagacgacaaggacaccatcgagaagctgaaggagaagaagctgacccccatcacctacccccagggcctggccatggccaaggagatcggcgccgtgaagtacctggagtgcagcgccctgacccagagaggcctgaagaccgtgttcgacgaggccatcagagccgtgctgtgccccccccccgtgaagaagagaaagagaaagtgcctgctgctgtga

SEQ ID NO: 9304 - RNA, 636 nt, synthetic construct
  misc_feature 1..636: note = derived and/or modified sequence opt5 fromRac1__Homo_sapiens__BAF84504
  source 1..636: mol_type = other RNA
atgcaggccatcaagtgcgtggtcgttggcgacggggctgtgggaaaaacctgtctgctcattagctacacaacgaacgccttccccggcgagtatatccctaccgtgtttgataattactccgcgaacgtcatggtggacgggaagccggttaatctgggactttgggatacagctggccaagaagactatgatagactgcggcccctctcttaccctcagaccgtgggggagacatatggaaaagacattaccagccgcggcaaggataaacccatcgccgacgtcttcctgatttgcttttcccttgtgtctcctgccagcttcgaaaacgttagagctaagtggtaccccgaggtgcggcaccattgtcctaatacaccgatcatcctggtcggcaccaagctcgatctgcgcgacgataaagacacgattgaaaagctgaaagagaagaaactcacccccatcacatatcctcaggggctggccatggctaaggagattggagccgtgaagtaccttgaatgctccgcgctgacccagagaggcctcaaaacagtgtttgatgaggccatccgggctgtcctgtgtccccctcccgttaagaaacgcaagagaaaatgccttctgctctga

SEQ ID NO: 9305 - protein, 192 aa, synthetic construct
  REGION 1..192: note = Rac1__Homo_sapiens__A4D2P1
MQAIKCVVVGDGAVGKTCLLISYTTNAFPGEYIPTVFDNYSANVMVDGKPVNLGLWDTAGQEDYDRLRPLSYPQTDVFLICFSLVSPASFENVRAKWYPEVRHHCPNTPIILVGTKLDLRDDKDTIEKLKEKKLTPITYPQGLAMAKEIGAVKYLECSALTQRGLKTVFDEAIRAVLCPPPVKKRKRKCLLL

SEQ ID NO: 9306 - RNA, 579 nt, synthetic construct
  misc_feature 1..579: note = Rac1__Homo_sapiens__BAF84495
  source 1..579: mol_type = other RNA
atgcaggccatcaagtgtgtggtggtgggagacggagctgtaggtaaaacttgcctactgatcagttacacaaccaatgcatttcctggagaatatatccctactgtctttgacaattattctgccaatgttatggtagatggaaaaccggtgaatctgggcttatgggatacagctggacaagaagattatgacagattacgccccctatcctatccgcaaacagatgtgttcttaatttgcttttcccttgtgagtcctgcatcatttgaaaatgtccgtgcaaagtggtatcctgaggtgcggcaccactgtcccaacactcccatcatcctagtgggaactaaacttgatcttagggatgataaagacacgatcgagaaactgaaggagaagaagctgactcccatcacctatccgcagggtctagccatggctaaggagattggtgctgtaaaatacctggagtgctcggcgctcacacagcgaggcctcaagacagtgtttgacgaagcgatccgagcagtcctctgcccgcctcccgtgaagaagaggaagagaaaatgcctgctgttgtaa

SEQ ID NO: 9307 - RNA, 579 nt, synthetic construct
  misc_feature 1..579: note = derived and/or modified sequence opt1 fromRac1__Homo_sapiens__BAF84495
  source 1..579: mol_type = other RNA
atgcaggccatcaagtgcgtggtcgtgggcgacggggccgtgggcaagacctgcctgctcatcagctacaccacgaacgcgttccccggggagtacatccccaccgtcttcgacaactactccgccaacgtgatggtggacggcaagcccgtcaacctggggctgtgggacaccgccggccaggaggactacgaccgcctccggcccctgagctacccccagaccgacgtgttcctgatctgcttctccctcgtgagcccggcctccttcgagaacgtccgcgccaagtggtaccccgaggtgcggcaccactgccccaacacgcccatcatcctggtgggcaccaagctggacctccgcgacgacaaggacaccatcgagaagctgaaggagaagaagctgaccccgatcacgtacccccaggggctcgcgatggccaaggagatcggcgccgtcaagtacctggagtgcagcgccctgacccagcgggggctcaagaccgtgttcgacgaggcgatccgcgccgtgctgtgcccgccgcccgtcaagaagcggaagcgcaagtgcctgctcctgtga

SEQ ID NO: 9308 - RNA, 579 nt, synthetic construct
  misc_feature 1..579: note = derived and/or modified sequence opt2 fromRac1__Homo_sapiens__BAF84495
  source 1..579: mol_type = other RNA
atgcaggccatcaagtgcgtcgtcgtcggcgacggcgccgtcggcaagacctgcctcctcatctcctacaccaccaacgccttccccggcgagtacatccccaccgtcttcgacaactactccgccaacgtcatggtcgacggcaagcccgtcaacctcggcctctgggacaccgccggccaggaggactacgaccgcctccgccccctctcctacccccagaccgacgtcttcctcatctgcttctccctcgtctcccccgcctccttcgagaacgtccgcgccaagtggtaccccgaggtccgccaccactgccccaacacccccatcatcctcgtcggcaccaagctcgacctccgcgacgacaaggacaccatcgagaagctcaaggagaagaagctcacccccatcacctacccccagggcctcgccatggccaaggagatcggcgccgtcaagtacctcgagtgctccgccctcacccagcgcggcctcaagaccgtcttcgacgaggccatccgcgccgtcctctgccccccccccgtcaagaagcgcaagcgcaagtgcctcctcctctga

SEQ ID NO: 9309 - RNA, 579 nt, synthetic construct
  misc_feature 1..579: note = derived and/or modified sequence opt3 fromRac1__Homo_sapiens__BAF84495
  source 1..579: mol_type = other RNA
atgcaggccatcaagtgcgtggtcgttggcgacggggctgtgggaaaaacctgtctgctcattagctacacaactaacgcattccccggtgagtatatacctacggtatttgataattactccgccaacgtgatggtcgacggcaagccagtgaatcttgggctgtgggataccgcgggacaagaagactatgatagattgaggccgttatcttacccccagacagacgttttcctgatctgcttttcactcgtgagtcctgctagcttcgagaacgtccgggccaaatggtatccagaagtgcgccaccattgtcccaatactcctattatcctagtaggcaccaagctggatcttcgagacgataaagacacaattgagaagctgaaggagaaaaagttgaccccaatcacttacccccagggtctcgcaatggccaaagaaataggggctgttaagtatctggagtgctccgcactgacacagcgtggactcaaaaccgtgtttgatgaagccatcagagctgtcttatgtcctccaccggtgaagaagaggaaacggaagtgcctgcttttgtga

SEQ ID NO: 9310 - RNA, 579 nt, synthetic construct
  misc_feature 1..579: note = derived and/or modified sequence opt4 fromRac1__Homo_sapiens__BAF84495
  source 1..579: mol_type = other RNA
atgcaggccatcaagtgcgtggtggtgggcgacggcgccgtgggcaagacctgcctgctgatcagctacaccaccaacgccttccccggcgagtacatccccaccgtgttcgacaactacagcgccaacgtgatggtggacggcaagcccgtgaacctgggcctgtgggacaccgccggccaggaggactacgacagactgagacccctgagctacccccagaccgacgtgttcctgatctgcttcagcctggtgagccccgccagcttcgagaacgtgagagccaagtggtaccccgaggtgagacaccactgccccaacacccccatcatcctggtgggcaccaagctggacctgagagacgacaaggacaccatcgagaagctgaaggagaagaagctgacccccatcacctacccccagggcctggccatggccaaggagatcggcgccgtgaagtacctggagtgcagcgccctgacccagagaggcctgaagaccgtgttcgacgaggccatcagagccgtgctgtgccccccccccgtgaagaagagaaagagaaagtgcctgctgctgtga

SEQ ID NO: 9311 - RNA, 579 nt, synthetic construct
  misc_feature 1..579: note = derived and/or modified sequence opt5 fromRac1__Homo_sapiens__BAF84495
  source 1..579: mol_type = other RNA
atgcaggccatcaagtgcgtggtcgttggcgacggggctgtgggaaaaacctgtctgctcattagctacacaacgaacgccttccccggcgagtatatccctaccgtgtttgataattactccgcgaacgtcatggtggacgggaagccggttaatctgggactttgggatacagctggccaagaagactatgatagactgcggcccctctcttaccctcagaccgacgtgttcctgatttgctttagccttgtctcccccgcctctttcgagaacgtgcgcgccaaatggtatcctgaagttagacaccattgtcccaatacacctatcattctggtggggaccaagctcgatctgcgggacgataaagacacaatcgagaagctgaaggagaaaaagctcaccccgatcacgtacccccagggactggctatggccaaagaaattggcgctgtcaagtatcttgagtgcagcgccctgacccagcgcggcctcaaaacagtgtttgatgaagcgatcagagccgtgctgtgtcctccccctgtcaagaagcggaaacgcaagtgccttctgctctga

SEQ ID NO: 9312 - protein, 148 aa, synthetic construct
  REGION 1..148: note = Rac1__Homo_sapiens__A4D2P2
MVDGKPVNLGLWDTAGQEDYDRLRPLSYPQTDVFLICFSLVSPASFENVRAKWYPEVRHHCPNTPIILVGTKLDLRDDKDTIEKLKEKKLTPITYPQGLAMAKEIGAVKYLECSALTQRGLKTVFDEAIRAVLCPPPVKKRKRKCLLL

SEQ ID NO: 9313 - RNA, 447 nt, synthetic construct
  misc_feature 1..447: note = Rac1__Homo_sapiens__EAL23720
  source 1..447: mol_type = other RNA
atggtagatggaaaaccggtgaatctgggcttatgggatacagctggacaagaagattatgacagattacgccccctatcctatccgcaaacagatgtgttcttaatttgcttttcccttgtgagtcctgcatcatttgaaaatgtccgtgcaaagtggtatcctgaggtgcggcaccactgtcccaacactcccatcatcctagtgggaactaaacttgatcttagggatgataaagacacgatcgagaaactgaaggagaagaagctgactcccatcacctatccgcagggtctagccatggctaaggagattggtgctgtaaaatacctggagtgctcggcgctcacacagcgaggcctcaagacagtgtttgacgaagcgatccgagcagtcctctgcccgcctcccgtgaagaagaggaagagaaaatgcctgctgttgtaa

SEQ ID NO: 9314 - RNA, 447 nt, synthetic construct
  misc_feature 1..447: note = derived and/or modified sequence opt1 fromRac1__Homo_sapiens__EAL23720
  source 1..447: mol_type = other RNA
atggtggacggcaagcccgtcaacctggggctctgggacaccgccggccaggaggactacgaccgcctgcggcccctgagctacccccagaccgacgtgttcctcatctgcttctccctggtgagccccgcctccttcgagaacgtccgcgcgaagtggtaccccgaggtgcggcaccactgcccgaacacgcccatcatcctggtggggaccaagctcgacctgcgcgacgacaaggacaccatcgagaagctgaaggagaagaagctcacccccatcacgtacccccagggcctggccatggccaaggagatcggggccgtcaagtacctggagtgcagcgccctcacccagcggggcctgaagaccgtgttcgacgaggcgatccgcgccgtgctgtgcccgccgcccgtcaagaagcggaagcgcaagtgcctcctgctgtga

SEQ ID NO: 9315 - RNA, 447 nt, synthetic construct
  misc_feature 1..447: note = derived and/or modified sequence opt2 fromRac1__Homo_sapiens__EAL23720
  source 1..447: mol_type = other RNA
atggtcgacggcaagcccgtcaacctcggcctctgggacaccgccggccaggaggactacgaccgcctccgccccctctcctacccccagaccgacgtcttcctcatctgcttctccctcgtctcccccgcctccttcgagaacgtccgcgccaagtggtaccccgaggtccgccaccactgccccaacacccccatcatcctcgtcggcaccaagctcgacctccgcgacgacaaggacaccatcgagaagctcaaggagaagaagctcacccccatcacctacccccagggcctcgccatggccaaggagatcggcgccgtcaagtacctcgagtgctccgccctcacccagcgcggcctcaagaccgtcttcgacgaggccatccgcgccgtcctctgccccccccccgtcaagaagcgcaagcgcaagtgcctcctcctctga

SEQ ID NO: 9316 - RNA, 447 nt, synthetic construct
  misc_feature 1..447: note = derived and/or modified sequence opt3 fromRac1__Homo_sapiens__EAL23720
  source 1..447: mol_type = other RNA
atggtggacggcaagcccgtcaacctggggctctgggataccgccggacaggaggactacgatagacttaggcctctgagctatccacaaacagacgttttcttgatctgcttttccttagtgtctccggcttcattcgaaaatgtacgggcaaaatggtaccccgaggtgcgccaccattgtcctaacactccaattatactggtcggtacgaagctagatctccgagacgataaagacaccatcgaaaagctgaaagagaagaaacttacacccattacttatcctcagggcctggccatggcgaaggaaatcggggctgtgaagtacttggagtgcagtgccctcacccagcgtggactgaaaacagtttttgatgaggcaattagagccgtgctgtgtccaccccctgtcaagaaaaggaagcggaagtgcctcttactgtga

SEQ ID NO: 9317 - RNA, 447 nt, synthetic construct
  misc_feature 1..447: note = derived and/or modified sequence opt4 fromRac1__Homo_sapiens__EAL23720
  source 1..447: mol_type = other RNA
atggtggacggcaagcccgtgaacctgggcctgtgggacaccgccggccaggaggactacgacagactgagacccctgagctacccccagaccgacgtgttcctgatctgcttcagcctggtgagccccgccagcttcgagaacgtgagagccaagtggtaccccgaggtgagacaccactgccccaacacccccatcatcctggtgggcaccaagctggacctgagagacgacaaggacaccatcgagaagctgaaggagaagaagctgacccccatcacctacccccagggcctggccatggccaaggagatcggcgccgtgaagtacctggagtgcagcgccctgacccagagaggcctgaagaccgtgttcgacgaggccatcagagccgtgctgtgccccccccccgtgaagaagagaaagagaaagtgcctgctgctgtga

SEQ ID NO: 9318 - RNA, 447 nt, synthetic construct
  misc_feature 1..447: note = derived and/or modified sequence opt5 fromRac1__Homo_sapiens__EAL23720
  source 1..447: mol_type = other RNA
atggtggacggcaagcccgtcaacctggggctctgggataccgccggacaggaggactacgatagactgcggcctcttagctatccgcaaacagacgttttcctgatctgcttttccctcgtgtctcccgctagcttcgaaaatgtgcgcgccaaatggtaccctgaggtcagacaccattgtcccaacacgcctattatcctggtgggcaccaaacttgatctgcgggacgataaggacacaattgaaaagctcaaagagaagaagctgacccccatcacatatcctcaggggctggcgatggctaaagaaattggagccgttaagtacctcgagtgctccgccctgacccagcgcggccttaaaacagtgtttgatgaggctatcagagccgtcctgtgtccgccccctgtgaagaaacggaagcgcaagtgcctcctgctttga

SEQ ID NO: 9319 - protein, 192 aa, synthetic construct; identical to SEQ ID NO: 9305
  REGION 1..192: note = Rac1__Homo_sapiens__P63000

SEQ ID NO: 9320 - RNA, 579 nt, synthetic construct; identical to SEQ ID NO: 9306
  misc_feature 1..579: note = Rac1__Homo_sapiens__AAA36537
  source 1..579: mol_type = other RNA

SEQ ID NO: 9321 - RNA, 579 nt, synthetic construct; identical to SEQ ID NO: 9307
  misc_feature 1..579: note = derived and/or modified sequence opt1 fromRac1__Homo_sapiens__AAA36537
  source 1..579: mol_type = other RNA

SEQ ID NO: 9322 - RNA, 579 nt, synthetic construct; identical to SEQ ID NO: 9308
  misc_feature 1..579: note = derived and/or modified sequence opt2 fromRac1__Homo_sapiens__AAA36537
  source 1..579: mol_type = other RNA

SEQ ID NO: 9323 - RNA, 579 nt, synthetic construct; identical to SEQ ID NO: 9309
  misc_feature 1..579: note = derived and/or modified sequence opt3 fromRac1__Homo_sapiens__AAA36537
  source 1..579: mol_type = other RNA

SEQ ID NO: 9324 - RNA, 579 nt, synthetic construct; identical to SEQ ID NO: 9310
  misc_feature 1..579: note = derived and/or modified sequence opt4 fromRac1__Homo_sapiens__AAA36537
  source 1..579: mol_type = other RNA

SEQ ID NO: 9325 - RNA, 579 nt, synthetic construct; identical to SEQ ID NO: 9311
  misc_feature 1..579: note = derived and/or modified sequence opt5 fromRac1__Homo_sapiens__AAA36537
  source 1..579: mol_type = other RNA

SEQ ID NO: 9326 - protein, 156 aa, synthetic construct
  REGION 1..156: note = Rac1__Homo_sapiens__W0UV93
MALEKSLVRLLLLVLILLVLGWVQPSLGKESRAKKFQRQHMDSDSSPSSSSTYCNQMMRRRNMTQGRCKPVNTFVHEPLVDVQNVCFQEKVTCKNGQGNCYKSNSSMHITDCRLTNGSRYPNCAYRTSPKERHIIVACEGSPYVPVHFDASVEDST

SEQ ID NO: 9327 - RNA, 471 nt, synthetic construct
  misc_feature 1..471: note = Rac1__Homo_sapiens__CDG31913
  source 1..471: mol_type = other RNA
atggctctggagaagtctcttgtccggctccttctgcttgtcctgatactgctggtgctgggctgggtccagccttccctgggcaaggaatcccgggccaagaaattccagcggcagcatatggactcagacagttcccccagcagcagctccacctactgtaaccaaatgatgaggcgccggaatatgacacaggggcggtgcaaaccagtgaacacctttgtgcacgagcccctggtagatgtccagaatgtctgtttccaggaaaaggtcacctgcaagaacgggcagggcaactgctacaagagcaactccagcatgcacatcacagactgccgcctgacaaacggctccaggtaccccaactgtgcataccggaccagcccgaaggagagacacatcattgtggcctgtgaagggagcccatatgtgccagtccactttgatgcttctgtggaggactctacctaa

SEQ ID NO: 9328 - RNA, 471 nt, synthetic construct
  misc_feature 1..471: note = derived and/or modified sequence opt1 fromRac1__Homo_sapiens__CDG31913
  source 1..471: mol_type = other RNA
atggccctggagaagtccctcgtgcgcctgctgctcctggtcctgatcctcctggtgctgggctgggtgcagcccagcctcgggaaggagagccgggccaagaagttccagcgccagcacatggactccgacagctccccgagctccagctccacctactgcaaccagatgatgcggcgccggaacatgacccagggccgctgcaagcccgtcaacacgttcgtgcacgagcccctggtggacgtccagaacgtgtgcttccaggagaaggtgacctgcaagaacgggcagggcaactgctacaagagcaactccagcatgcacatcaccgactgccggctgaccaacgggtcccgctaccccaactgcgcgtaccggacgagcccgaaggagcgccacatcatcgtcgcctgcgagggctccccctacgtgcccgtgcacttcgacgccagcgtcgaggactccacctga

SEQ ID NO: 9329 - RNA, 471 nt, synthetic construct
  misc_feature 1..471: note = derived and/or modified sequence opt2 fromRac1__Homo_sapiens__CDG31913
  source 1..471: mol_type = other RNA
atggccctcgagaagtccctcgtccgcctcctcctcctcgtcctcatcctcctcgtcctcggctgggtccagccctccctcggcaaggagtcccgcgccaagaagttccagcgccagcacatggactccgactcctccccctcctcctcctccacctactgcaaccagatgatgcgccgccgcaacatgacccagggccgctgcaagcccgtcaacaccttcgtccacgagcccctcgtcgacgtccagaacgtctgcttccaggagaaggtcacctgcaagaacggccagggcaactgctacaagtccaactcctccatgcacatcaccgactgccgcctcaccaacggctcccgctaccccaactgcgcctaccgcacctcccccaaggagcgccacatcatcgtcgcctgcgagggctccccctacgtccccgtccacttcgacgcctccgtcgaggactccacctga

SEQ ID NO: 9330 - RNA, 471 nt, synthetic construct
  misc_feature 1..471: note = derived and/or modified sequence opt3 fromRac1__Homo_sapiens__CDG31913
  source 1..471: mol_type = other RNA
atggccctggaaaagagcctcgtgagacttctgttgttagtcctgatcctactcgttctgggctgggtgcagccctcccttgggaaagagtctagggctaagaaattccaacggcagcacatggactcagatagtagcccttcctcttcgtcaacctactgcaaccagatgatgcgccgacgtaatatgacacagggaagatgtaagccagtaaacacttttgtgcatgagccgctggtcgacgtgcaaaatgtttgcttccaggaaaaagtgacgtgtaagaacggtcagggcaattgctataagagcaacagttccatgcacattaccgattgtaggttgacaaatgggtctcggtaccccaactgcgcatatcgcactagccctaaagagagacatataatcgtcgcctgtgaaggatccccatacgtgcccgtacactttgacgcgtcagttgaggatagtacctga

SEQ ID NO: 9331 - RNA, 471 nt, synthetic construct
  misc_feature 1..471: note = derived and/or modified sequence opt4 fromRac1__Homo_sapiens__CDG31913
  source 1..471: mol_type = other RNA
atggccctggagaagagcctggtgagactgctgctgctggtgctgatcctgctggtgctgggctgggtgcagcccagcctgggcaaggagagcagagccaagaagttccagagacagcacatggacagcgacagcagccccagcagcagcagcacctactgcaaccagatgatgagaagaagaaacatgacccagggcagatgcaagcccgtgaacaccttcgtgcacgagcccctggtggacgtgcagaacgtgtgcttccaggagaaggtgacctgcaagaacggccagggcaactgctacaagagcaacagcagcatgcacatcaccgactgcagactgaccaacggcagcagataccccaactgcgcctacagaaccagccccaaggagagacacatcatcgtggcctgcgagggcagcccctacgtgcccgtgcacttcgacgccagcgtggaggacagcacctga

SEQ ID NO: 9332 - RNA, 471 nt, synthetic construct
  misc_feature 1..471: note = derived and/or modified sequence opt5 fromRac1__Homo_sapiens__CDG31913
  source 1..471: mol_type = other RNA
atggccctggaaaagagcctcgtgagactgcttctgctcgtcctgatccttctggttctcggctgggtgcagccctccctggggaaagagtctcgggctaagaaattccaacgccagcacatggacagcgattcctctcctagctcctctagcacctactgcaaccagatgatgagacggcgcaatatgacacagggaagatgtaagccggtgaacacgtttgtccatgagcccctggtggacgttcaaaatgtgtgcttccaggaaaaagtcacctgtaagaacggccaggggaattgctataagtccaacagctctatgcacattacagattgtcggctcaccaatggatcccgctaccctaactgcgcctatagaacaagccccaaagagcggcatatcattgtggcgtgtgaaggctctccttacgttcccgtgcactttgacgcttccgtcgaggatagcacctga

SEQ ID NO: 9333 - protein, 193 aa, synthetic construct
  REGION 1..193: note = RhoA__Homo_sapiens__A0A024R324
MAAIRKKLVIVGDGACGKTCLLIVFSKDQFPEVYVPTVFENYVADIEVDGKQVELALWDTAGQEDYDRLRPLSYPDTDVILMCFSIDSPDSLENIPEKWTPEVKHFCPNVPIILVGNKKDLRNDEHTRRELAKMKQEPVKPEEGRDMANRIGAFGYMECSAKTKDGVREVFEMATRAALQARRGKKKSGCLVL

SEQ ID NO: 9334 - RNA, 582 nt, synthetic construct
  misc_feature 1..582: note = RhoA__Homo_sapiens__EAW64978
  source 1..582: mol_type = other RNA
atggctgccatccggaagaaactggtgattgttggtgatggagcctgtggaaagacatgcttgctcatagtcttcagcaaggaccagttcccagaggtgtatgtgcccacagtgtttgagaactatgtggcagatatcgaggtggatggaaagcaggtagagttggctttgtgggacacagctgggcaggaagattatgatcgcctgaggcccctctcctacccagataccgatgttatactgatgtgtttttccatcgacagccctgatagtttagaaaacatcccagaaaagtggaccccagaagtcaagcatttctgtcccaacgtgcccatcatcctggttgggaataagaaggatcttcggaatgatgagcacacaaggcgggagctagccaagatgaagcaggagccggtgaaacctgaagaaggcagagatatggcaaacaggattggcgcttttgggtacatggagtgttcagcaaagaccaaagatggagtgagagaggtttttgaaatggctacgagagctgctctgcaagctagacgtgggaagaaaaaatctgggtgccttgtcttgtga

SEQ ID NO: 9335 - RNA, 582 nt, synthetic construct
  misc_feature 1..582: note = derived and/or modified sequence opt1 fromRhoA__Homo_sapiens__EAW64978
  source 1..582: mol_type = other RNA
atggccgccatccgcaagaagctggtgatcgtcggcgacggggcgtgcggcaagacctgcctcctgatcgtgttcagcaaggaccagttccccgaggtgtacgtcccgaccgtgttcgagaactacgtggccgacatcgaggtcgacgggaagcaggtcgagctggccctctgggacacggccggccaggaggactacgaccggctgcgccccctgagctaccccgacaccgacgtgatcctcatgtgcttcagcatcgactcccccgacagcctggagaacatcccggagaagtggacccccgaggtgaagcacttctgccccaacgtgcccatcatcctggtggggaacaagaaggacctccggaacgacgagcacacccgccgggagctggccaagatgaagcaggagccggtcaagcccgaggagggccgcgacatggcgaaccggatcggcgccttcgggtacatggagtgctccgccaagacgaaggacggcgtgcgcgaggtgttcgagatggccacccgggcggccctgcaggcccgccgggggaagaagaagtccggctgcctcgtcctgtga

SEQ ID NO: 9336 - RNA, 582 nt, synthetic construct
  misc_feature 1..582: note = derived and/or modified sequence opt2 fromRhoA__Homo_sapiens__EAW64978
  source 1..582: mol_type = other RNA
atggccgccatccgcaagaagctcgtcatcgtcggcgacggcgcctgcggcaagacctgcctcctcatcgtcttctccaaggaccagttccccgaggtctacgtccccaccgtcttcgagaactacgtcgccgacatcgaggtcgacggcaagcaggtcgagctcgccctctgggacaccgccggccaggaggactacgaccgcctccgccccctctcctaccccgacaccgacgtcatcctcatgtgcttctccatcgactcccccgactccctcgagaacatccccgagaagtggacccccgaggtcaagcacttctgccccaacgtccccatcatcctcgtcggcaacaagaaggacctccgcaacgacgagcacacccgccgcgagctcgccaagatgaagcaggagcccgtcaagcccgaggagggccgcgacatggccaaccgcatcggcgccttcggctacatggagtgctccgccaagaccaaggacggcgtccgcgaggtcttcgagatggccacccgcgccgccctccaggcccgccgcggcaagaagaagtccggctgcctcgtcctctga

SEQ ID NO: 9337 - RNA, 582 nt, synthetic construct
  misc_feature 1..582: note = derived and/or modified sequence opt3 fromRhoA__Homo_sapiens__EAW64978
  source 1..582: mol_type = other RNA
atggccgctatcagaaagaaactggtgattgtcggcgacggggcatgcggaaagacctgtctccttatagttttcagcaaagatcagtttcccgaggtgtacgtacctacagtgttcgaaaactatgtcgccgacatcgaggtggatggtaagcaagttgaactggcgttgtgggacactgctggccaggaggattacgacaggttacggccactgtcctatccggatacggacgtgattctaatgtgcttttctatcgattcacccgacagtctcgaaaatattcctgagaaatggaccccagaggtcaagcacttctgtcccaacgtgcctatcatactggtagggaataagaaagatcttcgcaacgacgaacatacacgacgtgagctggccaagatgaaacaggaaccagttaagcccgaggagggaagagatatggcaaataggatcggcgcctttggttacatggaatgcagcgctaaaactaaggacggggtgcgggaggtcttcgaaatggcaacccgcgccgctttgcaggccagaaggggaaagaaaaagtccggctgtctcgtgctgtga

SEQ ID NO: 9338 - RNA, 582 nt, synthetic construct
  misc_feature 1..582: note = derived and/or modified sequence opt4 fromRhoA__Homo_sapiens__EAW64978
  source 1..582: mol_type = other RNA
atggccgccatcagaaagaagctggtgatcgtgggcgacggcgcctgcggcaagacctgcctgctgatcgtgttcagcaaggaccagttccccgaggtgtacgtgcccaccgtgttcgagaactacgtggccgacatcgaggtggacggcaagcaggtggagctggccctgtgggacaccgccggccaggaggactacgacagactgagacccctgagctaccccgacaccgacgtgatcctgatgtgcttcagcatcgacagccccgacagcctggagaacatccccgagaagtggacccccgaggtgaagcacttctgccccaacgtgcccatcatcctggtgggcaacaagaaggacctgagaaacgacgagcacaccagaagagagctggccaagatgaagcaggagcccgtgaagcccgaggagggcagagacatggccaacagaatcggcgccttcggctacatggagtgcagcgccaagaccaaggacggcgtgagagaggtgttcgagatggccaccagagccgccctgcaggccagaagaggcaagaagaagagcggctgcctggtgctgtga

SEQ ID NO: 9339 - RNA, 582 nt, synthetic construct
  misc_feature 1..582: note = derived and/or modified sequence opt5 fromRhoA__Homo_sapiens__EAW64978
  source 1..582: mol_type = other RNA
atggccgctatcagaaagaaactggtgattgtcggcgacggggcctgcggaaagacctgtctcctgatcgttttcagcaaagatcagtttcccgaggtgtacgtgcctacagtcttcgaaaactatgtggcggacattgaggttgatggcaagcaagtggaacttgctctgtgggacacggccgggcaggaggattacgaccggctccgcccgctgtcctatcccgataccgacgtcatccttatgtgcttttctattgatagccctgactccctggaaaatatccccgagaaatggacacctgaggtgaagcacttctgtcccaacgttcctatcattctcgtgggaaataagaaagatctgagaaacgacgaacatacccggcgcgagctggccaagatgaaacaggaaccggtcaagcccgaggagggcagagatatggctaatcggatcggggcctttggatacatggaatgctctgctaaaacaaaggacggcgtgcgcgaggtgttcgaaatggccaccagagcggccctccaggctcggcgcggcaagaaaaagagcgggtgtctggtcctttga

SEQ ID NO: 9340 - protein, 193 aa, synthetic construct; identical to SEQ ID NO: 9333
  REGION 1..193: note = RhoA__Homo_sapiens__P61586

SEQ ID NO: 9341 - RNA, 582 nt, synthetic construct
  misc_feature 1..582: note = RhoA__Homo_sapiens__AAC33178
  source 1..582: mol_type = other RNA
atggctgccatccggaagaaactggtgattgttggtgatggagcctgtggaaagacatgcttgctcatagtcttcagcaaggaccagttcccagaggtgtatgtgcccacagtgtttgagaactatgtggcagatatcgaggtggatggaaagcaggtagagttggctttgtgggacacagctgggcaggaagattatgatcgcctgaggcccctctcctacccagataccgatgttatactgatgtgtttttccatcgacagccctgatagtttagaaaacatcccagaaaagtggaccccagaagtcaagcatttctgtcccaacgtgcccatcatcctggttgggaataagaaggatcttcggaatgatgagcacacaaggcgggagctagccaagatgaagcaggagccggtgaaacctgaagaaggcagagatatggcaaacaggattggcgcttttgggtacatggagtgttcagcaaagaccaaagatggagtgagagaggtttttgaaatggctacgagagctgctctgcaagctagacgtgggaagaaaaaatctggttgccttgtcttgtga

SEQ ID NO: 9342 - RNA, 582 nt, synthetic construct; identical to SEQ ID NO: 9335
  misc_feature 1..582: note = derived and/or modified sequence opt1 fromRhoA__Homo_sapiens__AAC33178
  source 1..582: mol_type = other RNA

SEQ ID NO: 9343 - RNA, 582 nt, synthetic construct; identical to SEQ ID NO: 9336
  misc_feature 1..582: note = derived and/or modified sequence opt2 fromRhoA__Homo_sapiens__AAC33178
  source 1..582: mol_type = other RNA

SEQ ID NO: 9344 - RNA, 582 nt, synthetic construct; identical to SEQ ID NO: 9337
  misc_feature 1..582: note = derived and/or modified sequence opt3 fromRhoA__Homo_sapiens__AAC33178
  source 1..582: mol_type = other RNA

SEQ ID NO: 9345 - RNA, 582 nt, synthetic construct; identical to SEQ ID NO: 9338
  misc_feature 1..582: note = derived and/or modified sequence opt4 fromRhoA__Homo_sapiens__AAC33178
  source 1..582: mol_type = other RNA

SEQ ID NO: 9346 - RNA, 582 nt, synthetic construct; identical to SEQ ID NO: 9339
  misc_feature 1..582: note = derived and/or modified sequence opt5 fromRhoA__Homo_sapiens__AAC33178
  source 1..582: mol_type = other RNA

SEQ ID NO: 9347 - protein, 925 aa, synthetic construct
  REGION 1..925: note = RIG-I__Homo_sapiens__O95786
MTTEQRRSLQAFQDYIRKTLDPTYILSYMAPWFREEEVQYIQAEKNNKGPMEAATLFLKFLLELQEEGWFRGFLDALDHAGYSGLYEAIESWDFKKIEKLEEYRLLLKRLQPEFKTRIIPTDIISDLSECLINQECEEILQICSTKGMMAGAEKLVECLLRSDKENWPKTLKLALEKERNKFSELWIVEKGIKDVETEDLEDKMETSDIQIFYQEDPECQNLSENSCPPSEVSDTNLYSPFKPRNYQLELALPAMKGKNTIICAPTGCGKTFVSLLICEHHLKKFPQGQKGKVVFFANQIPVYEQQKSVFSKYFERHGYRVTGISGATAENVPVEQIVENNDIIILTPQILVNNLKKGTIPSLSIFTLMIFDECHNTSKQHPYNMIMFNYLDQKLGGSSGPLPQVIGLTASVGVGDAKNTDEALDYICKLCASLDASVIATVKHNLEELEQVVYKPQKFFRKVESRISDKFKYIIAQLMRDTESLAKRICKDLENLSQIQNREFGTQKYEQWIVTVQKACMVFQMPDKDEESRICKALFLYTSHLRKYNDALIISEHARMKDALDYLKDFFSNVRAAGFDEIEQDLTQRFEEKLQELESVSRDPSNENPKLEDLCFILQEEYHLNPETITILFVKTRALVDALKNWIEGNPKLSFLKPGILTGRGKTNQNTGMTLPAQKCILDAFKASGDHNILIATSVADEGIDIAQCNLVILYEYVGNVIKMIQTRGRGRARGSKCFLLTSNAGVIEKEQINMYKEKMMNDSILRLQTWDEAVFREKILHIQTHEKFIRDSQEKPKPVPDKENKKLLCRKCKALACYTADVRVIEECHYTVLGDAFKECFVSRPHPKPKQFSSFEKRAKIFCARQNCSHDWGIHVKYKTFEIPVIKIESFVVEDIATGVQTLYSKWKDFHFEKIPFDPAEMSK

SEQ ID NO: 9348 - RNA, 2778 nt, synthetic construct
  misc_feature 1..2778: note = RIG-I__Homo_sapiens__AAI32787
  source 1..2778: mol_type = other RNA
atgaccaccgagcagcgacgcagcctgcaagccttccaggattatatccggaagaccctggaccctacctacatcctgagctacatggccccctggtttagggaggaagaggtgcagtatattcaggctgagaaaaacaacaagggcccaatggaggctgccacactttttctcaagttcctgttggagctccaggaggaaggctggttccgtggctttttggatgccctagaccatgcaggttattctggactttatgaagccattgaaagttgggatttcaaaaaaattgaaaagttggaggagtatagattacttttaaaacgtttacaaccagaatttaaaaccagaattatcccaaccgatatcatttctgatctgtctgaatgtttaattaatcaggaatgtgaagaaattctacagatttgctctactaaggggatgatggcaggtgcagagaaattggtggaatgccttctcagatcagacaaggaaaactggcccaaaactttgaaacttgctttggagaaagaaaggaacaagttcagtgaactgtggattgtagagaaaggtataaaagatgttgaaacagaagatcttgaggataagatggaaacttctgacatacagattttctaccaagaagatccagaatgccagaatcttagtgagaattcatgtccaccttcagaagtgtctgatacaaacttgtacagcccatttaaaccaagaaattaccaattagagcttgctttgcctgctatgaaaggaaaaaacacaataatatgtgctcctacaggttgtggaaaaacctttgtttcactgcttatatgtgaacatcatcttaaaaaattcccacaaggacaaaaggggaaagttgtcttttttgcgaatcagatcccagtgtatgaacagcagaaatctgtattctcaaaatactttgaaagacatgggtatagagttacaggcatttctggagcaacagctgagaatgtcccagtggaacagattgttgagaacaatgacatcatcattttaactccacagattcttgtgaacaaccttaaaaagggaacgattccatcactatccatctttactttgatgatatttgatgaatgccacaacactagtaaacaacacccgtacaatatgatcatgtttaattatctagatcagaaacttggaggatcttcaggcccactgccccaggtcattgggctgactgcctcggttggtgttggggatgccaaaaacacagatgaagccttggattatatctgcaagctgtgtgcttctcttgatgcgtcagtgatagcaacagtcaaacacaatctggaggaactggagcaagttgtttataagccccagaagtttttcaggaaagtggaatcacggattagcgacaaatttaaatacatcatagctcagctgatgagggacacagagagtctggcaaagagaatctgcaaagacctcgaaaacttatctcaaattcaaaatagggaatttggaacacagaaatatgaacaatggattgttacagttcagaaagcatgcatggtgttccagatgccagacaaagatgaagagagcaggatttgtaaagccctgtttttatacacttcacatttgcggaaatataatgatgccctcattatcagtgagcatgcacgaatgaaagatgctctggattacttgaaagacttcttcagcaatgtccgagcagcaggattcgatgagattgagcaagatcttactcagagatttgaagaaaagctgcaggaactagaaagtgtttccagggatcccagcaatgagaatcctaaacttgaagacctctgcttcatcttacaagaagagtaccacttaaacccagagacaataacaattctctttgtgaaaaccagagcacttgtggacgctttaaaaaattggattgaaggaaatcctaaactcagttttctaaaacctggcatattgactggacgtggcaaaacaaatcagaacacaggaatgaccctcccggcacagaagtgtatattggatgcattcaaagccagtggagatcacaatattctgattgccacctcagttgctgatgaaggcattgacattgcacagtgcaatcttgtcatcctttatgagtatgtgggcaatgtcatcaaaatgatccaaaccagaggcagaggaagagcaagaggtagcaagtgcttccttctgactagtaatgctggtgtaattgaaaaagaacaaataaacatgtacaaagaaaaaatgatgaatgactctattttacgccttcagacatgggacgaagcagtatttagggaaaagattctgcatatacagactcatgaaaaattcatcagagatagtcaagaaaaaccaaaacctgtacctgataaggaaaataaaaaactgctctgcagaaagtgcaaagccttggcatgttacacagctgacgtaagagtgatagaggaatgccattacactgtgcttggagatgcttttaaggaatgctttgtgagtagaccacatcccaagccaaagcagttttcaagttttgaaaaaagagcaaagatattctgtgcccgacagaactgcagccatgactggggaatccatgtgaagtacaagacatttgagattccagttataaaaattgaaagttttgtggtggaggatattgcaactggagttcagacactgtactcgaagtggaaggactttcattttgagaagataccatttgatccagcagaaatgtccaaatga

SEQ ID NO: 9349 - RNA, 2778 nt, synthetic construct
  misc_feature 1..2778: note = derived and/or modified sequence opt1 fromRIG-I__Homo_sapiens__AAI32787
  source 1..2778: mol_type = other RNA
atgaccaccgagcagcgccggagcctgcaggccttccaggactacatccgcaagacgctcgaccccacctacatcctgtcctacatggccccgtggttccgggaggaggaggtgcagtacatccaggcggagaagaacaacaagggccccatggaggccgccaccctgttcctcaagttcctgctggagctccaggaggaggggtggttccgcggcttcctggacgccctggaccacgccgggtacagcggcctctacgaggcgatcgagtcctgggacttcaagaagatcgagaagctggaggagtaccggctgctcctgaagcgcctgcagcccgagttcaagacccggatcatccccacggacatcatcagcgacctctccgagtgcctgatcaaccaggagtgcgaggagatcctgcagatctgcagcaccaaggggatgatggccggcgccgagaagctcgtcgagtgcctgctgcgctccgacaaggagaactggccgaagaccctcaagctggccctggagaaggagcggaacaagttcagcgagctctggatcgtggagaagggcatcaaggacgtggagaccgaggacctggaggacaagatggagacgtccgacatccagatcttctaccaggaggaccccgagtgccagaacctgagcgagaactcctgcccgcccagcgaggtctccgacaccaacctctacagccccttcaagccccgcaactaccagctggagctggcgctccccgccatgaaggggaagaacaccatcatctgcgcccccaccggctgcgggaagacgttcgtgtccctgctgatctgcgagcaccacctcaagaagttcccgcagggccagaaggggaaggtggtcttcttcgccaaccagatccccgtgtacgagcagcagaagtccgtgttcagcaagtacttcgagcggcacggctaccgcgtcaccggcatcagcggggccaccgcggagaacgtgcccgtggagcagatcgtcgagaacaacgacatcatcatcctgacgccccagatcctggtgaacaacctcaagaagggcaccatcccgtccctgagcatcttcaccctgatgatcttcgacgagtgccacaacaccagcaagcagcacccctacaacatgatcatgttcaactacctcgaccagaagctcgggggctccagcggccccctgccccaggtgatcgggctcaccgcctccgtcggcgtgggggacgccaagaacacggacgaggccctggactacatctgcaagctgtgcgccagcctcgacgcgtccgtgatcgccaccgtcaagcacaacctggaggagctggagcaggtcgtgtacaagccgcagaagttcttccggaaggtggagagccgcatctccgacaagttcaagtacatcatcgcccagctcatgcgggacaccgagagcctggccaagcgcatctgcaaggacctggagaacctgtcccagatccagaaccgggagttcggcacccagaagtacgagcagtggatcgtgacggtgcagaaggcctgcatggtcttccagatgcccgacaaggacgaggagagccgcatctgcaaggcgctgttcctgtacacctcccacctccggaagtacaacgacgccctgatcatcagcgagcacgcccgcatgaaggacgccctggactacctgaaggacttcttctccaacgtgcgggccgcggggttcgacgagatcgagcaggacctcacccagcgcttcgaggagaagctgcaggagctggagagcgtctcccgcgaccccagcaacgagaaccccaagctcgaggacctgtgcttcatcctgcaggaggagtaccacctcaacccggagaccatcacgatcctgttcgtgaagacccgggccctggtggacgccctcaagaactggatcgagggcaaccccaagctgtccttcctgaagcccggcatcctcaccgggcgcggcaagaccaaccagaacacggggatgaccctgcccgcccagaagtgcatcctggacgcgttcaaggccagcggcgaccacaacatcctcatcgccacctccgtcgccgacgaggggatcgacatcgcccagtgcaacctggtgatcctgtacgagtacgtgggcaacgtcatcaagatgatccagacccggggccgcgggcgggcgcgcggcagcaagtgcttcctcctgacgagcaacgccggggtgatcgagaaggagcagatcaacatgtacaaggagaagatgatgaacgactccatcctgcggctccagacctgggacgaggccgtgttccgcgagaagatcctgcacatccagacccacgagaagttcatccgggacagccaggagaagccgaagcccgtccccgacaaggagaacaagaagctgctctgccgcaagtgcaaggccctggcctgctacaccgcggacgtgcgggtgatcgaggagtgccactacaccgtcctgggcgacgccttcaaggagtgcttcgtgtcccgcccgcaccccaagcccaagcagttcagctccttcgagaagcgggccaagatcttctgcgcccgccagaactgcagccacgactgggggatccacgtgaagtacaagacgttcgagatccccgtcatcaagatcgagtccttcgtggtggaggacatcgccaccggcgtccagaccctctacagcaagtggaaggacttccacttcgagaagatcccgttcgaccccgcggagatgtccaagtga

SEQ ID NO: 9350 - RNA, 2778 nt, synthetic construct
  misc_feature 1..2778: note = derived and/or modified sequence opt2 fromRIG-I__Homo_sapiens__AAI32787
  source 1..2778: mol_type = other RNA
atgaccaccgagcagcgccgctccctccaggccttccaggactacatccgcaagaccctcgaccccacctacatcctctcctacatggccccctggttccgcgaggaggaggtccagtacatccaggccgagaagaacaacaagggccccatggaggccgccaccctcttcctcaagttcctcctcgagctccaggaggagggctggttccgcggcttcctcgacgccctcgaccacgccggctactccggcctctacgaggccatcgagtcctgggacttcaagaagatcgagaagctcgaggagtaccgcctcctcctcaagcgcctccagcccgagttcaagacccgcatcatccccaccgacatcatctccgacctctccgagtgcctcatcaaccaggagtgcgaggagatcctccagatctgctccaccaagggcatgatggccggcgccgagaagctcgtcgagtgcctcctccgctccgacaaggagaactggcccaagaccctcaagctcgccctcgagaaggagcgcaacaagttctccgagctctggatcgtcgagaagggcatcaaggacgtcgagaccgaggacctcgaggacaagatggagacctccgacatccagatcttctaccaggaggaccccgagtgccagaacctctccgagaactcctgccccccctccgaggtctccgacaccaacctctactcccccttcaagccccgcaactaccagctcgagctcgccctccccgccatgaagggcaagaacaccatcatctgcgcccccaccggctgcggcaagaccttcgtctccctcctcatctgcgagcaccacctcaagaagttcccccagggccagaagggcaaggtcgtcttcttcgccaaccagatccccgtctacgagcagcagaagtccgtcttctccaagtacttcgagcgccacggctaccgcgtcaccggcatctccggcgccaccgccgagaacgtccccgtcgagcagatcgtcgagaacaacgacatcatcatcctcaccccccagatcctcgtcaacaacctcaagaagggcaccatcccctccctctccatcttcaccctcatgatcttcgacgagtgccacaacacctccaagcagcacccctacaacatgatcatgttcaactacctcgaccagaagctcggcggctcctccggccccctcccccaggtcatcggcctcaccgcctccgtcggcgtcggcgacgccaagaacaccgacgaggccctcgactacatctgcaagctctgcgcctccctcgacgcctccgtcatcgccaccgtcaagcacaacctcgaggagctcgagcaggtcgtctacaagccccagaagttcttccgcaaggtcgagtcccgcatctccgacaagttcaagtacatcatcgcccagctcatgcgcgacaccgagtccctcgccaagcgcatctgcaaggacctcgagaacctctcccagatccagaaccgcgagttcggcacccagaagtacgagcagtggatcgtcaccgtccagaaggcctgcatggtcttccagatgcccgacaaggacgaggagtcccgcatctgcaaggccctcttcctctacacctcccacctccgcaagtacaacgacgccctcatcatctccgagcacgcccgcatgaaggacgccctcgactacctcaaggacttcttctccaacgtccgcgccgccggcttcgacgagatcgagcaggacctcacccagcgcttcgaggagaagctccaggagctcgagtccgtctcccgcgacccctccaacgagaaccccaagctcgaggacctctgcttcatcctccaggaggagtaccacctcaaccccgagaccatcaccatcctcttcgtcaagacccgcgccctcgtcgacgccctcaagaactggatcgagggcaaccccaagctctccttcctcaagcccggcatcctcaccggccgcggcaagaccaaccagaacaccggcatgaccctccccgcccagaagtgcatcctcgacgccttcaaggcctccggcgaccacaacatcctcatcgccacctccgtcgccgacgagggcatcgacatcgcccagtgcaacctcgtcatcctctacgagtacgtcggcaacgtcatcaagatgatccagacccgcggccgcggccgcgcccgcggctccaagtgcttcctcctcacctccaacgccggcgtcatcgagaaggagcagatcaacatgtacaaggagaagatgatgaacgactccatcctccgcctccagacctgggacgaggccgtcttccgcgagaagatcctccacatccagacccacgagaagttcatccgcgactcccaggagaagcccaagcccgtccccgacaaggagaacaagaagctcctctgccgcaagtgcaaggccctcgcctgctacaccgccgacgtccgcgtcatcgaggagtgccactacaccgtcctcggcgacgccttcaaggagtgcttcgtctcccgcccccaccccaagcccaagcagttctcctccttcgagaagcgcgccaagatcttctgcgcccgccagaactgctcccacgactggggcatccacgtcaagtacaagaccttcgagatccccgtcatcaagatcgagtccttcgtcgtcgaggacatcgccaccggcgtccagaccctctactccaagtggaaggacttccacttcgagaagatccccttcgaccccgccgagatgtccaagtga

SEQ ID NO: 9351 - RNA, 2778 nt, synthetic construct
  misc_feature 1..2778: note = derived and/or modified sequence opt3 fromRIG-I__Homo_sapiens__AAI32787
  source 1..2778: mol_type = other RNA
atgaccacagagcagagaaggagcctgcaagccttccaggactacatccggaagactctcgatcccacgtatattctttcctacatggctccttggtttcgcgaagaggaagtgcagtatatacaggcagagaaaaacaataagggcccaatggaagccgcgaccctgttcttgaaatttttactggagctacaagaggaagggtggttccgaggatttctcgacgctctggatcacgccggttactctggcctttatgaggcaatcgaatcatgggacttcaagaaaattgagaagctggaggaataccgtttgctcctgaagagactgcagccggagtttaaaacaaggatcattcccactgatatcataagtgacctcagcgaatgcttaatcaaccaggagtgtgaagagattctgcagatctgctccaccaaggggatgatggccggagctgagaaacttgtcgaatgtttgctgcggtctgataaggagaattggcctaaaacactaaagctcgcactggaaaaggagcgcaacaaattctcggaactttggattgttgagaagggcatcaaagacgtggagaccgaagatctggaggacaagatggaaacttcagatatacaaatcttttatcaggaggacccagaatgccagaatttgagcgagaacagttgtcccccttccgaggtatctgatacaaatctctacagcccattcaaacccagaaactaccagctggaattagccctgcctgctatgaagggtaaaaataccattatttgcgccccaacggggtgtggaaagacttttgtgtccctccttatctgcgagcatcacctgaagaaattcccgcaaggccagaagggcaaagtcgtgtttttcgcgaaccagatccccgtttatgaacaacagaagtcagtgttcagtaaatactttgagaggcatgggtatcgggtcaccggaattagcggtgcaacagccgagaatgtgcctgtagaacagatagttgagaacaatgacatcattatcttgactccacagatactggtgaacaatctgaagaagggcaccattccctctctctccatcttcacactgatgatctttgacgaatgtcacaacacctcaaaacaacatccttacaacatgattatgttcaattatcttgatcagaagctagggggaagcagtggcccattgccccaggtcatcggtctcacggcttctgtgggggtgggagacgccaaaaacactgatgaggcactggactacatttgcaagttatgtgcttccctggatgccagcgtcatagcgacagttaaacacaatctagaggagctcgaacaggtggtatataagccgcaaaagtttttccgcaaagtggaatcgcgaatctctgacaagtttaaatacattatcgcccagctgatgagagataccgagtcccttgcaaagaggatctgcaaagacttggaaaacctgtcacagattcagaatcgggagttcggcactcaaaagtacgaacagtggatagtcacagtgcagaaggcttgcatggtttttcagatgcctgataaagacgaggagagtcgtatctgtaaggccctcttcctgtataccagccaccttcgcaaatacaacgatgctctgattatctccgaacatgccagaatgaaggacgcattggactatctcaaagactttttctctaatgtgagggccgctggctttgatgagattgaacaagatctgacgcagcggttcgaggaaaagttacaggagctggagagcgtctcacgagaccccagtaacgaaaatccaaaactagaggatctctgcttcatcctgcaagaagagtaccaccttaaccctgagaccataacaatcttgtttgtgaagactcgcgcgctggtagacgcactcaagaattggattgaagggaaccccaaactgtccttcttaaagccaggaatcctgaccggtagaggcaaaacaaatcagaacactgggatgacccttcccgcccagaagtgtattttggatgcttttaaagccagcggagaccataatatcctcatagcaacatctgttgccgatgagggcattgacatcgctcagtgcaacctggtgattctatatgaatacgtcggtaacgtgatcaagatgatacaaaccagggggcggggccgcgccagaggatcaaagtgtttcctgctcacgagtaatgcaggcgtcatcgagaaagaacagattaacatgtataaggagaaaatgatgaatgatagcatcctgaggcttcagacttgggacgaggcggtgtttcgtgaaaagattttgcacatccagacacacgagaaattcatacgggattcccaagaaaagcctaagccagttccggacaaagagaacaagaaactgttatgccgaaagtgtaaagctctcgcctgctacaccgcagacgtgagagtaattgaagagtgtcattacactgtcctgggggatgcctttaaggagtgcttcgtgtctaggccccaccctaagccaaaacagttttcgagcttcgaaaagcgcgctaaaatcttttgtgcccggcagaattgctcccatgactggggaatccacgttaagtataaaaccttcgagattcccgtgatcaagattgaatcatttgtcgtggaggatatagcaacaggtgtacagaccctttacagtaaatggaaggacttccatttcgaaaagatcccttttgatccagctgagatgtctaaatga

SEQ ID NO: 9352 - RNA, 2778 nt, synthetic construct
  misc_feature 1..2778: note = derived and/or modified sequence opt4 fromRIG-I__Homo_sapiens__AAI32787
  source 1..2778: mol_type = other RNA
atgaccaccgagcagagaagaagcctgcaggccttccaggactacatcagaaagaccctggaccccacctacatcctgagctacatggccccctggttcagagaggaggaggtgcagtacatccaggccgagaagaacaacaagggccccatggaggccgccaccctgttcctgaagttcctgctggagctgcaggaggagggctggttcagaggcttcctggacgccctggaccacgccggctacagcggcctgtacgaggccatcgagagctgggacttcaagaagatcgagaagctggaggagtacagactgctgctgaagagactgcagcccgagttcaagaccagaatcatccccaccgacatcatcagcgacctgagcgagtgcctgatcaaccaggagtgcgaggagatcctgcagatctgcagcaccaagggcatgatggccggcgccgagaagctggtggagtgcctgctgagaagcgacaaggagaactggcccaagaccctgaagctggccctggagaaggagagaaacaagttcagcgagctgtggatcgtggagaagggcatcaaggacgtggagaccgaggacctggaggacaagatggagaccagcgacatccagatcttctaccaggaggaccccgagtgccagaacctgagcgagaacagctgcccccccagcgaggtgagcgacaccaacctgtacagccccttcaagcccagaaactaccagctggagctggccctgcccgccatgaagggcaagaacaccatcatctgcgcccccaccggctgcggcaagaccttcgtgagcctgctgatctgcgagcaccacctgaagaagttcccccagggccagaagggcaaggtggtgttcttcgccaaccagatccccgtgtacgagcagcagaagagcgtgttcagcaagtacttcgagagacacggctacagagtgaccggcatcagcggcgccaccgccgagaacgtgcccgtggagcagatcgtggagaacaacgacatcatcatcctgaccccccagatcctggtgaacaacctgaagaagggcaccatccccagcctgagcatcttcaccctgatgatcttcgacgagtgccacaacaccagcaagcagcacccctacaacatgatcatgttcaactacctggaccagaagctgggcggcagcagcggccccctgccccaggtgatcggcctgaccgccagcgtgggcgtgggcgacgccaagaacaccgacgaggccctggactacatctgcaagctgtgcgccagcctggacgccagcgtgatcgccaccgtgaagcacaacctggaggagctggagcaggtggtgtacaagccccagaagttcttcagaaaggtggagagcagaatcagcgacaagttcaagtacatcatcgcccagctgatgagagacaccgagagcctggccaagagaatctgcaaggacctggagaacctgagccagatccagaacagagagttcggcacccagaagtacgagcagtggatcgtgaccgtgcagaaggcctgcatggtgttccagatgcccgacaaggacgaggagagcagaatctgcaaggccctgttcctgtacaccagccacctgagaaagtacaacgacgccctgatcatcagcgagcacgccagaatgaaggacgccctggactacctgaaggacttcttcagcaacgtgagagccgccggcttcgacgagatcgagcaggacctgacccagagattcgaggagaagctgcaggagctggagagcgtgagcagagaccccagcaacgagaaccccaagctggaggacctgtgcttcatcctgcaggaggagtaccacctgaaccccgagaccatcaccatcctgttcgtgaagaccagagccctggtggacgccctgaagaactggatcgagggcaaccccaagctgagcttcctgaagcccggcatcctgaccggcagaggcaagaccaaccagaacaccggcatgaccctgcccgcccagaagtgcatcctggacgccttcaaggccagcggcgaccacaacatcctgatcgccaccagcgtggccgacgagggcatcgacatcgcccagtgcaacctggtgatcctgtacgagtacgtgggcaacgtgatcaagatgatccagaccagaggcagaggcagagccagaggcagcaagtgcttcctgctgaccagcaacgccggcgtgatcgagaaggagcagatcaacatgtacaaggagaagatgatgaacgacagcatcctgagactgcagacctgggacgaggccgtgttcagagagaagatcctgcacatccagacccacgagaagttcatcagagacagccaggagaagcccaagcccgtgcccgacaaggagaacaagaagctgctgtgcagaaagtgcaaggccctggcctgctacaccgccgacgtgagagtgatcgaggagtgccactacaccgtgctgggcgacgccttcaaggagtgcttcgtgagcagaccccaccccaagcccaagcagttcagcagcttcgagaagagagccaagatcttctgcgccagacagaactgcagccacgactggggcatccacgtgaagtacaagaccttcgagatccccgtgatcaagatcgagagcttcgtggtggaggacatcgccaccggcgtgcagaccctgtacagcaagtggaaggacttccacttcgagaagatccccttcgaccccgccgagatgagcaagtga

SEQ ID NO: 9353 - RNA, 2778 nt, synthetic construct
  misc_feature 1..2778: note = derived and/or modified sequence opt5 fromRIG-I__Homo_sapiens__AAI32787
  source 1..2778: mol_type = other RNA
atgaccacagagcagagacggagcctgcaagccttccaggactacatccgcaagacgctcgatcccacctatattctgtcctacatggctccttggtttagagaagaggaagtgcagtatatccaggccgagaaaaacaataagggcccgatggaagcggctacacttttcctgaaatttctcctggagcttcaagaggaagggtggttccggggatttctggacgccctcgatcacgccggctactctgggctgtatgaggctattgaaagctgggacttcaagaaaatcgagaagctggaggaataccgcctcctgcttaagagactgcagcccgagtttaaaacccggattatccctacagatatcatttccgacctctctgaatgcctgatcaaccaggagtgtgaagagattcttcagatctgcagcaccaagggaatgatggccggcgctgagaaactggtcgaatgtctcctgcgctccgataaggagaattggcccaaaacactgaagctcgccctggaaaaggagagaaacaaattctctgaactttggattgttgagaaggggatcaaagacgtggagaccgaagatctggaggacaagatggaaacgagcgatattcaaatcttttatcaggaggaccctgaatgccagaatctctccgagaacagctgtcccccttctgaggtgtccgataccaatctgtacagcccgttcaaaccccggaactaccagcttgaactggcgctccctgccatgaaggggaaaaatacaatcatttgcgctcccaccggctgtggcaagacatttgtctctctgctgatctgcgagcatcacctcaagaaattccctcaagggcagaagggaaaagtggtgtttttcgccaaccagattcccgtttatgaacaacagaagtccgtcttcagcaaatactttgagcgccatggctatagagtgaccgggatctctggagctacggccgagaatgttccggtggaacagattgtcgagaacaatgacatcatcattctgacacctcagatccttgtgaacaatctgaagaagggcaccattccctccctcagcatcttcacactgatgatttttgacgaatgtcacaacacctccaaacaacatccttacaacatgatcatgttcaattatcttgatcagaagctgggaggatctagcggccccctcccccaggtgatcggcctgaccgcgtccgtcggggttggagacgccaaaaacacagatgaggctctggactacatttgcaagctctgtgccagcctggatgcttctgtgatcgccacggtgaaacacaatcttgaggaactggagcaggtcgtgtataagcctcaaaagtttttccggaaagttgaatcccgcattagcgacaagtttaaatacatcattgcccagctcatgagagataccgagtctctggctaagcggatctgcaaagacctggaaaaccttagccagattcagaatcgcgagttcggcacacaaaagtacgaacagtggatcgtgaccgtccagaaggcgtgcatggtgtttcagatgccggataaagacgaggagtccagaatctgtaaggccctcttcctgtatacatctcatctgcggaaatacaacgatgctctcattatcagcgaacacgccagaatgaaggacgccctggactatcttaaagactttttctccaatgttcgcgctgccgggtttgatgagattgaacaagatctgacccagcggttcgaggaaaagctccaggagctggagagcgtgtctagagacccctccaacgaaaatcctaaactggaggatctttgcttcatcctccaagaagagtaccacctgaaccccgagacgattacaatcctgtttgtcaagacccgcgcgctcgtggacgctctgaagaattggatcgaaggaaaccctaaacttagcttcctgaagcccggcattctcaccgggcggggaaaaacaaatcagaacaccggcatgacactgccggcccagaagtgtatcctggatgcctttaaggcttctggcgaccataatattcttatcgccacgtccgtcgctgatgaggggattgacatcgcccagtgcaacctcgtgatcctgtatgaatacgttggaaacgtgattaaaatgatccaaaccagaggccgcgggcgggcgagaggaagcaagtgtttcctgctcacatccaatgccggcgtcattgagaaagaacagatcaacatgtataaggagaaaatgatgaatgattctattctgcgccttcagacctgggacgaggctgtgtttcgggaaaagatcctgcacatccagacacacgagaaattcattagagatagccaagaaaagcctaagcccgttcctgacaaagagaacaagaaactcctgtgccgcaagtgtaaagccctggcttgctacaccgccgacgtgcgggtcatcgaagagtgtcattacacggtgcttggggatgcgtttaaggagtgcttcgtgtccagaccccaccctaagcccaaacagttttctagcttcgaaaagcgggccaaaatcttttgtgctcgccagaattgctcccatgactggggcattcacgttaagtataaaaccttcgagattccggtcatcaagattgagagctttgtggtggaagatatcgccacaggagtccagaccctctactctaaatggaaggacttccatttcgaaaagatcccttttgatcccgctgagatgtccaaatga

SEQ ID NO: 9354 - protein, 432 aa, synthetic construct
  REGION 1..432: note = RIG-I__Homo_sapiens__Q8IUD6
MAGLGLGSAVPVWLAEDDLGCIICQGLLDWPATLPCGHSFCRHCLEALWGARDARRWACPTCRQGAAQQPHLRKNTLLQDLADKYRRAAREIQAGSDPAHCPCPGSSSLSSAAARPRRRPELQRVAVEKSITEVAQELTELVEHLVDIVRSLQNQRPLSESGPDNELSILGKAFSSGVDLSMASPKLVTSDTAAGKIRDILHDLEEIQEKLQESVTWKEAPEAQMQGELLEAPSSSSCPLPDQSHPALRRASRFAQWAIHPTFNLKSLSCSLEVSKDSRTVTVSHRPQPYRWSCERFSTSQVLCSQALSSGKHYWEVDTRNCSHWAVGVASWEMSRDQVLGRTMDSCCVEWKGTSQLSAWHMVKETVLGSDRPGVVGIWLNLEEGKLAFYSVDNQEKLLYECTISASSPLYPAFWLYGLHPGNYLIIKQVKV

SEQ ID NO: 9355 - RNA, 1299 nt, synthetic construct
  misc_feature 1..1299: note = RIG-I__Homo_sapiens__AAI26421
  source 1..1299: mol_type = other RNA
atggcgggcctgggcctgggctccgccgttcccgtgtggctggccgaggacgacctcggctgcatcatctgccaggggctgctggactggcccgccacgctgccctgcggccacagcttctgccgccactgcctggaggccctgtggggcgcccgcgacgcccgccgctgggcctgccccacttgccgccagggcgccgcgcagcagccgcacctgcggaagaacacgctactgcaggacctggccgacaagtaccgccgcgccgcacgcgagatacaggcgggctccgaccctgcccactgcccctgcccgggctccagttccctctccagcgcggccgcgaggccccggcgccgcccggaactgcagcgggtggcagtagagaagagcatcacagaagttgctcaggagctgacagagctggtggaacatcttgtagacattgtcagaagcctgcagaatcagaggcccctatcagaatctggaccagacaacgaactgagcatcctgggcaaggctttttcttctggggtggatctttccatggcttctccaaagctggtgacttccgacacagctgcagggaaaatcagagatattctccatgacctagaagaaattcaggaaaaattacaagaaagcgtcacctggaaagaggctcctgaagcacaaatgcagggagaactcctggaagccccgtcttcctcctcatgcccattgcctgaccagagccaccctgcactcaggagagcttctcggtttgctcagtgggccatccatccaacctttaacttgaagagcctttcctgcagcctggaggtgtccaaggattcccgtacagtgactgtgtctcaccgcccacaaccctatcgctggagctgtgagaggttttctaccagccaggtcttatgttcccaggccctgtcttctggaaagcattactgggaagtggacactaggaattgcagccactgggcagttggggtggcttcctgggagatgagccgcgaccaggtcctgggaaggactatggactcttgttgtgtggaatggaaggggactagccagctctctgcatggcacatggtcaaggaaactgtccttggctcagacagacctggggtggtgggcatctggctgaaccttgaggagggaaagcttgccttctattcagtggacaatcaggagaagcttctgtatgagtgtaccatctctgcctcctctcctttgtaccctgccttctggctgtatggcttacatcctggaaattacctgataataaagcaagtaaaggtgtaa

SEQ ID NO: 9356 - RNA, 1299 nt, synthetic construct
  misc_feature 1..1299: note = derived and/or modified sequence opt1 fromRIG-I__Homo_sapiens__AAI26421
  source 1..1299: mol_type = other RNA
atggccggcctggggctcggcagcgccgtgcccgtctggctggcggaggacgacctggggtgcatcatctgccagggcctcctggactggccggccaccctgccctgcgggcactccttctgccgccactgcctcgaggccctgtggggcgcccgggacgcccgccggtgggcgtgcccgacctgccgccagggcgccgcccagcagccccacctccggaagaacacgctgctgcaggacctggccgacaagtaccgccgggcggcccgcgagatccaggccgggagcgaccccgcccactgcccctgccccggctccagctccctcagctccgccgcggcccggccccgccggcgcccggagctgcagcgggtggccgtggagaagtccatcaccgaggtcgcccaggagctgaccgagctcgtggagcacctggtggacatcgtccgctccctgcagaaccagcggcccctcagcgagtccgggcccgacaacgagctgagcatcctgggcaaggccttctccagcggggtggacctctccatggcgagccccaagctggtgacctccgacacggccgccggcaagatccgcgacatcctgcacgacctcgaggagatccaggagaagctgcaggagagcgtcacctggaaggaggccccggaggcccagatgcagggcgagctgctcgaggcgccctccagcagctcctgccccctgcccgaccagagccacccggccctgcggcgcgcctcccggttcgcccagtgggccatccaccccaccttcaacctcaagagcctgtcctgcagcctggaggtgtccaaggacagccgcaccgtgacggtctcccaccggccccagccctaccgctggagctgcgagcgcttctccaccagccaggtgctctgctcccaggcgctgagctccgggaagcactactgggaggtggacacccggaactgcagccactgggccgtcggcgtggcctcctgggagatgagccgcgaccaggtgctggggcggaccatggactcctgctgcgtcgagtggaagggcacgagccagctcagcgcctggcacatggtgaaggagaccgtgctgggctccgaccgcccgggggtcgtgggcatctggctgaacctcgaggaggggaagctggcgttctacagcgtggacaaccaggagaagctgctctacgagtgcaccatctccgccagcagccccctgtaccccgccttctggctgtacggcctccaccccgggaactacctgatcatcaagcaggtcaaggtgtga

SEQ ID NO: 9357 - RNA, 1299 nt, synthetic construct
  misc_feature 1..1299: note = derived and/or modified sequence opt2 fromRIG-I__Homo_sapiens__AAI26421
  source 1..1299: mol_type = other RNA
atggccggcctcggcctcggctccgccgtccccgtctggctcgccgaggacgacctcggctgcatcatctgccagggcctcctcgactggcccgccaccctcccctgcggccactccttctgccgccactgcctcgaggccctctggggcgcccgcgacgcccgccgctgggcctgccccacctgccgccagggcgccgcccagcagccccacctccgcaagaacaccctcctccaggacctcgccgacaagtaccgccgcgccgcccgcgagatccaggccggctccgaccccgcccactgcccctgccccggctcctcctccctctcctccgccgccgcccgcccccgccgccgccccgagctccagcgcgtcgccgtcgagaagtccatcaccgaggtcgcccaggagctcaccgagctcgtcgagcacctcgtcgacatcgtccgctccctccagaaccagcgccccctctccgagtccggccccgacaacgagctctccatcctcggcaaggccttctcctccggcgtcgacctctccatggcctcccccaagctcgtcacctccgacaccgccgccggcaagatccgcgacatcctccacgacctcgaggagatccaggagaagctccaggagtccgtcacctggaaggaggcccccgaggcccagatgcagggcgagctcctcgaggccccctcctcctcctcctgccccctccccgaccagtcccaccccgccctccgccgcgcctcccgcttcgcccagtgggccatccaccccaccttcaacctcaagtccctctcctgctccctcgaggtctccaaggactcccgcaccgtcaccgtctcccaccgcccccagccctaccgctggtcctgcgagcgcttctccacctcccaggtcctctgctcccaggccctctcctccggcaagcactactgggaggtcgacacccgcaactgctcccactgggccgtcggcgtcgcctcctgggagatgtcccgcgaccaggtcctcggccgcaccatggactcctgctgcgtcgagtggaagggcacctcccagctctccgcctggcacatggtcaaggagaccgtcctcggctccgaccgccccggcgtcgtcggcatctggctcaacctcgaggagggcaagctcgccttctactccgtcgacaaccaggagaagctcctctacgagtgcaccatctccgcctcctcccccctctaccccgccttctggctctacggcctccaccccggcaactacctcatcatcaagcaggtcaaggtctga

SEQ ID NO: 9358 - RNA, 1299 nt, synthetic construct
  misc_feature 1..1299: note = derived and/or modified sequence opt3 fromRIG-I__Homo_sapiens__AAI26421
  source 1..1299: mol_type = other RNA
atggccggcctggggctcggaagcgctgtgcccgtctggcttgcagaggacgatctgggttgcatcatttgtcagggcttgttagactggcctgccaccctgccatgcgggcactccttctgtagacattgcctagaagcgctctggggagctagggatgcccggcgctgggcatgtccgacatgccgacaaggcgccgctcagcagccccatctgcgtaagaacactcttctgcaggacttggcagataaatacagaagggccgctcgggagatacaagccggttctgaccctgcgcactgtccatgccccgggtcaagtagcctctcctctgcagccgctcgccctagaaggcggccagaactgcagcgcgttgccgtggagaagtcgatcacggaagtagcacaggagctgaccgagctcgtggaacacttagtcgatattgtgcgatcactgcagaatcaaagaccccttagcgagagtggacctgacaacgaattgtccatcctgggcaaggctttttctagcggcgttgatctatccatggcctcaccaaaactcgtgacaagtgacactgcggccgggaaaattagggatatcctgcatgaccttgaggagatacaggaaaagctgcaggagagcgtcacctggaaggaagcaccggaggctcagatgcaaggagaattgctcgaggccccctcttcctcaagctgtcctctgccagatcagagtcaccccgctttacggcgtgcctctcgcttcgcacagtgggccatccaccctacatttaatctgaaatccctcagctgctcgcttgaggtgtctaaggactccagaaccgtaactgtttcacataggccacaaccctatcggtggagttgtgaacgattcagcacatcccaggtgctgtgctctcaggctttgagctcaggtaaacactactgggaggtcgacacccgcaactgcagtcattgggcggtgggcgtggcatcctgggaaatgagcagagatcaggtcctagggaggacgatggactcttgttgcgttgagtggaagggaacttcacaactgagtgcctggcacatggtgaaagaaaccgtactcggcagcgatcggccgggtgtggtcgggatttggctgaatcttgaggagggaaagctggctttttattccgtggacaaccaggaaaagttgctctacgagtgtacaatctctgcctcgagccctctgtatcccgcattctggttatacggcctgcacccaggcaattatctaattatcaaacaggttaaggtgtga

SEQ ID NO: 9359 - RNA, 1299 nt, synthetic construct
  misc_feature 1..1299: note = derived and/or modified sequence opt4 fromRIG-I__Homo_sapiens__AAI26421
  source 1..1299: mol_type = other RNA
atggccggcctgggcctgggcagcgccgtgcccgtgtggctggccgaggacgacctgggctgcatcatctgccagggcctgctggactggcccgccaccctgccctgcggccacagcttctgcagacactgcctggaggccctgtggggcgccagagacgccagaagatgggcctgccccacctgcagacagggcgccgcccagcagccccacctgagaaagaacaccctgctgcaggacctggccgacaagtacagaagagccgccagagagatccaggccggcagcgaccccgcccactgcccctgccccggcagcagcagcctgagcagcgccgccgccagacccagaagaagacccgagctgcagagagtggccgtggagaagagcatcaccgaggtggcccaggagctgaccgagctggtggagcacctggtggacatcgtgagaagcctgcagaaccagagacccctgagcgagagcggccccgacaacgagctgagcatcctgggcaaggccttcagcagcggcgtggacctgagcatggccagccccaagctggtgaccagcgacaccgccgccggcaagatcagagacatcctgcacgacctggaggagatccaggagaagctgcaggagagcgtgacctggaaggaggcccccgaggcccagatgcagggcgagctgctggaggcccccagcagcagcagctgccccctgcccgaccagagccaccccgccctgagaagagccagcagattcgcccagtgggccatccaccccaccttcaacctgaagagcctgagctgcagcctggaggtgagcaaggacagcagaaccgtgaccgtgagccacagaccccagccctacagatggagctgcgagagattcagcaccagccaggtgctgtgcagccaggccctgagcagcggcaagcactactgggaggtggacaccagaaactgcagccactgggccgtgggcgtggccagctgggagatgagcagagaccaggtgctgggcagaaccatggacagctgctgcgtggagtggaagggcaccagccagctgagcgcctggcacatggtgaaggagaccgtgctgggcagcgacagacccggcgtggtgggcatctggctgaacctggaggagggcaagctggccttctacagcgtggacaaccaggagaagctgctgtacgagtgcaccatcagcgccagcagccccctgtaccccgccttctggctgtacggcctgcaccccggcaactacctgatcatcaagcaggtgaaggtgtga

SEQ ID NO: 9360 - RNA, 1299 nt, synthetic construct
  misc_feature 1..1299: note = derived and/or modified sequence opt5 fromRIG-I__Homo_sapiens__AAI26421
  source 1..1299: mol_type = other RNA
atggccggcctggggctcggaagcgctgtgcccgtctggctggccgaggacgatcttggctgcatcatttgtcaggggctgctcgactggcctgcgaccctgccgtgcggacactccttctgtagacattgccttgaagctctgtggggcgcccgggatgcccgcagatgggcttgtcccacatgccggcaaggggccgctcagcagcctcacctccgcaagaacacgctgctgcaggacctcgccgataaatacagacgggcggcccgcgagatccaagctggatctgaccccgcccattgtccttgccccggcagctcctctctgagctccgctgccgcgagacctcggcgcagaccggaacttcagcgggttgccgtggagaagtctattaccgaagtggctcaggagctgacagagctcgtcgaacacctggtggatatcgttcgcagccttcagaatcaaagacccctgtccgagagcggccctgacaacgaactctctattctggggaaagccttttccagcggagtggatctgtctatggcttcccccaagctcgtcaccagcgacacagccgccggcaaaatccgggatatcctgcatgaccttgaggagattcaggaaaagctgcaggagtctgtgacctggaaggaagctcctgaggcgcagatgcaaggggaactcctggaggccccctccagctcctcttgtccgcttcctgatcagagccaccccgctctgcgcagagcctcccggttcgcccagtgggctatccaccctacatttaatctcaaaagcctgtcttgctccctggaggttagcaaggactctagaaccgtgacggtcagccatcgcccccaaccctatcggtggtcctgtgaaagattctctaccagccaggtgctctgctcccaggccctgagctctggaaaacactactgggaggtggacacacgcaactgctcccattgggcggtcggcgttgctagctgggaaatgtctcgggatcaggtgcttgggagaaccatggactcctgttgcgtggagtggaagggaacaagccaactgtccgcctggcacatggtcaaagaaaccgtgctcggctctgatcgccctggcgttgtggggatttggctgaatcttgaggagggaaagctggccttttatagcgtcgacaaccaggaaaagctcctgtacgagtgtacgatctccgcttctagcccgctgtatcccgccttctggctctacggcctgcaccctgggaattatcttattatcaaacaggtgaaggtttga

SEQ ID NO: 9361 - protein, 836 aa, synthetic construct
  REGION 1..836: note = Src-Kinases__Homo_sapiens__Q9H5V8
MAGLNCGVSIALLGVLLLGAARLPRGAEAFEIALPRESNITVLIKLGTPTLLAKPCYIVISKRHITMLSIKSGERIVFTFSCQSPENHFVIEIQKNIDCMSGPCPFGEVQLQPSTSLLPTLNRTFIWDVKAHKSIGLELQFSIPRLRQIGPGESCPDGVTHSISGRIDATVVRIGTFCSNGTVSRIKMQEGVKMALHLPWFHPRNVSGFSIANRSSIKRLCIIESVFEGEGSATLMSANYPEGFPEDELMTWQFVVPAHLRASVSFLNFNLSNCERKEERVEYYIPGSTTNPEVFKLEDKQPGNMAGNFNLSLQGCDQDAQSPGILRLQFQVLVQHPQNESNKIYVVDLSNERAMSLTIEPRPVKQSRKFVPGCFVCLESRTCSSNLTLTSGSKHKISFLCDDLTRLWMNVEKTISCTDHRYCQRKSYSLQVPSDILHLPVELHDFSWKLLVPKDRLSLVLVPAQKLQQHTHEKPCNTSFSYLVASAIPSQDLYFGSFCPGGSIKQIQVKQNISVTLRTFAPSFQQEASRQGLTVSFIPYFKEEGVFTVTPDTKSKVYLRTPNWDRGLPSLTSVSWNISVPRDQVACLTFFKERSGVVCQTGRAFMIIQEQRTRAEEIFSLDEDVLPKPSFHHHSFWVNISNCSPTSGKQLDLLFSVTLTPRTVDLTVILIAAVGGGVLLLSALGLIICCVKKKKKKTNKGPAVGIYNDNINTEMPRQPKKFQKGRKDNDSHVYAVIEDTMVYGHLLQDSSGSFLQPEVDTYRPFQGTMGVCPPSPPTICSRAPTAKLATEEPPPRSPPESESEPYTFSHPNNGDVSSKDTDIPLLNTQEPMEPAE

SEQ ID NO: 9362 - RNA, 2511 nt, synthetic construct
  misc_feature 1..2511: note = Src-Kinases__Homo_sapiens__AAO34538
  source 1..2511: mol_type = other RNA
atggccggcctgaactgcggggtctctatcgcactgctaggggttctgctgctgggtgcggcgcgcctgccgcgcggggcagaagcttttgagattgctctgccacgagaaagcaacattacagttctcataaagctggggaccccgactctgctggcaaaaccctgttacatcgtcatttctaaaagacatataaccatgttgtccatcaagtctggagaaagaatagtctttacctttagctgccagagtcctgagaatcactttgtcatagagatccagaaaaatattgactgtatgtcaggcccatgtccttttggggaggttcagcttcagccctcgacatcgttgttgcctaccctcaacagaactttcatctgggatgtcaaagctcataagagcatcggtttagagctgcagttttccatccctcgcctgaggcagatcggtccgggtgagagctgcccagacggagtcactcactccatcagcggccgaatcgatgccaccgtggtcaggatcggaaccttctgcagcaatggcactgtgtcccggatcaagatgcaagaaggagtgaaaatggccttacacctcccatggttccaccccagaaatgtctccggcttcagcattgcaaaccgctcatctataaaacgtctgtgcatcatcgagtctgtgtttgagggtgaaggctcagcaaccctgatgtctgccaactacccagaaggcttccctgaggatgagctcatgacgtggcagtttgtcgttcctgcacacctgcgggccagcgtctccttcctcaacttcaacctctccaactgtgagaggaaggaggagcgggttgaatactacatcccgggctccaccaccaaccccgaggtgttcaagctggaggacaagcagcctgggaacatggcggggaacttcaacctctctctgcaaggctgtgaccaagatgcccaaagtccagggatcctccggctgcagttccaagttttggtccaacatccacaaaatgaaagcaataaaatctacgtggttgacttgagtaatgagcgagccatgtcactcaccatcgagccacggcccgtcaaacagagccgcaagtttgtccctggctgtttcgtgtgtctagaatctcggacctgcagtagcaacctcaccctgacatctggctccaaacacaaaatctccttcctttgtgatgatctgacacgtctgtggatgaatgtggaaaaaaccataagctgcacagaccaccggtactgccaaaggaaatcctactcactccaggtgcccagtgacatcctccacctgcctgtggagctgcatgacttctcctggaagctgctggtgcccaaggacaggctcagcctggtgctggtgccagcccagaagctgcagcagcatacacacgagaagccctgcaacaccagcttcagctacctcgtggccagtgccatacccagccaggacctgtacttcggctccttctgcccgggaggctctatcaagcagatccaggtgaagcagaacatctcggtgacccttcgcacctttgcccccagcttccaacaagaggcctccaggcagggtctgacggtgtcctttataccttatttcaaagaggaaggcgttttcacggtgacccctgacacaaaaagcaaggtctacctgaggacccccaactgggaccggggcctgccatccctcacctctgtgtcctggaacatcagcgtgcccagagaccaggtggcctgcctgactttctttaaggagcggagcggcgtggtctgccagacagggcgcgcattcatgatcatccaggagcagcggacccgggctgaggagatcttcagcctggacgaggatgtgctccccaagccaagcttccaccatcacagcttctgggtcaacatctctaactgcagccccacgagcggcaagcagctagacctgctcttctcggtgacacttaccccaaggactgtggacttgactgtcatcctcatcgcagcggtgggaggtggagtcttactgctgtctgccctcgggctcatcatttgctgtgtgaaaaagaagaaaaagaagacaaacaagggccccgctgtgggtatctacaatgacaacatcaatactgagatgccgaggcagccaaaaaagtttcagaaagggcgaaaggacaatgactcccatgtgtatgcagtcatcgaggacaccatggtatatgggcatctgctacaggattccagcggctccttcctgcagccagaggtggacacctaccggccgttccagggcaccatgggggtctgtcctccctccccacccaccatatgctccagggccccaactgcaaagttggccactgaggagccacctcctcgctcccctcctgagtctgagagtgaaccgtacaccttctcccatcccaacaatggggatgtaagcagcaaggacacagacattcccttactgaacactcaggagcccatggagccagcagaataa

SEQ ID NO: 9363 - RNA, 2511 nt, synthetic construct
  misc_feature 1..2511: note = derived and/or modified sequence opt1 fromSrc-Kinases__Homo_sapiens__AAO34538
  source 1..2511: mol_type = other RNA
atggccggcctgaactgcggggtgagcatcgccctcctgggcgtcctgctcctgggggcggcccgcctgccccggggcgccgaggccttcgagatcgccctcccgcgcgagtccaacatcaccgtgctgatcaagctggggacccccacgctcctggcgaagccctgctacatcgtgatcagcaagcggcacatcaccatgctgtccatcaagagcggcgagcgcatcgtcttcaccttctcctgccagagccccgagaaccacttcgtgatcgagatccagaagaacatcgactgcatgtccggcccgtgccccttcggggaggtgcagctccagcccagcacctccctgctgcccacgctcaaccggaccttcatctgggacgtcaaggcccacaagagcatcggcctggagctgcagttctccatcccgcgcctccggcagatcgggcccggcgagagctgccccgacggggtgacccactccatcagcggccgcatcgacgccaccgtggtccggatcggcacgttctgctccaacgggaccgtgagccgcatcaagatgcaggagggcgtgaagatggccctgcacctcccctggttccacccgcggaacgtctccgggttcagcatcgcgaaccgctccagcatcaagcggctgtgcatcatcgagagcgtgttcgagggcgagggctccgccaccctgatgagcgccaactaccccgaggggttccccgaggacgagctgatgacctggcagttcgtggtccccgcccacctccgcgcctccgtgagcttcctgaacttcaacctgtccaactgcgagcggaaggaggagcgcgtggagtactacatcccgggcagcacgaccaaccccgaggtcttcaagctcgaggacaagcagcccgggaacatggcgggcaacttcaacctgtccctgcaggggtgcgaccaggacgcccagagccccggcatcctccggctgcagttccaggtgctggtgcagcacccgcagaacgagtccaacaagatctacgtcgtggacctcagcaacgagcgcgccatgtccctgaccatcgagccccggcccgtgaagcagagccgcaagttcgtccccggctgcttcgtgtgcctggagtcccggacctgcagctccaacctcacgctgaccagcgggtccaagcacaagatcagcttcctgtgcgacgacctcacccgcctgtggatgaacgtcgagaagaccatctcctgcacggaccaccgctactgccagcgcaagagctacagcctccaggtgccgtccgacatcctgcacctccccgtggagctgcacgacttcagctggaagctgctggtccccaaggaccggctgtccctcgtgctggtgcccgcccagaagctgcagcagcacacccacgagaagccgtgcaacaccagcttctcctacctggtcgccagcgcgatcccctcccaggacctctacttcggcagcttctgccccgggggctccatcaagcagatccaggtgaagcagaacatcagcgtgaccctgcggacgttcgccccgtccttccagcaggaggccagccgccaggggctgaccgtctccttcatcccctacttcaaggaggagggcgtgttcaccgtgacccccgacaccaagagcaaggtctacctccggacgcccaactgggaccgcggcctgccgtccctgaccagcgtgtcctggaacatcagcgtgccccgggaccaggtcgcctgcctcaccttcttcaaggagcgcagcggggtggtgtgccagacgggccgggccttcatgatcatccaggagcagcgcacccgggcggaggagatcttctccctggacgaggacgtcctgcccaagcccagcttccaccaccactccttctgggtgaacatcagcaactgctccccgaccagcgggaagcagctcgacctgctgttctccgtgaccctcacgccccgcaccgtcgacctgaccgtgatcctgatcgccgccgtgggcgggggcgtcctcctgctgagcgccctcggcctgatcatctgctgcgtgaagaagaagaagaagaagaccaacaaggggcccgccgtgggcatctacaacgacaacatcaacaccgagatgccccggcagccgaagaagttccagaaggggcgcaaggacaacgactcccacgtctacgcggtgatcgaggacacgatggtgtacggccacctcctgcaggacagctccggcagcttcctgcagcccgaggtcgacacctaccggcccttccaggggaccatgggcgtgtgcccgccctccccgcccaccatctgcagccgcgcccccacggccaagctggccaccgaggagcccccgccccggtccccgcccgagagcgagtccgagccctacaccttcagccaccccaacaacggggacgtgtccagcaaggacaccgacatccccctcctgaacacgcaggagcccatggagcccgcggagtga

SEQ ID NO: 9364 - RNA, 2511 nt, synthetic construct
  misc_feature 1..2511: note = derived and/or modified sequence opt2 fromSrc-Kinases__Homo_sapiens__AAO34538
  source 1..2511: mol_type = other RNA
atggccggcctcaactgcggcgtctccatcgccctcctcggcgtcctcctcctcggcgccgcccgcctcccccgcggcgccgaggccttcgagatcgccctcccccgcgagtccaacatcaccgtcctcatcaagctcggcacccccaccctcctcgccaagccctgctacatcgtcatctccaagcgccacatcaccatgctctccatcaagtccggcgagcgcatcgtcttcaccttctcctgccagtcccccgagaaccacttcgtcatcgagatccagaagaacatcgactgcatgtccggcccctgccccttcggcgaggtccagctccagccctccacctccctcctccccaccctcaaccgcaccttcatctgggacgtcaaggcccacaagtccatcggcctcgagctccagttctccatcccccgcctccgccagatcggccccggcgagtcctgccccgacggcgtcacccactccatctccggccgcatcgacgccaccgtcgtccgcatcggcaccttctgctccaacggcaccgtctcccgcatcaagatgcaggagggcgtcaagatggccctccacctcccctggttccacccccgcaacgtctccggcttctccatcgccaaccgctcctccatcaagcgcctctgcatcatcgagtccgtcttcgagggcgagggctccgccaccctcatgtccgccaactaccccgagggcttccccgaggacgagctcatgacctggcagttcgtcgtccccgcccacctccgcgcctccgtctccttcctcaacttcaacctctccaactgcgagcgcaaggaggagcgcgtcgagtactacatccccggctccaccaccaaccccgaggtcttcaagctcgaggacaagcagcccggcaacatggccggcaacttcaacctctccctccagggctgcgaccaggacgcccagtcccccggcatcctccgcctccagttccaggtcctcgtccagcacccccagaacgagtccaacaagatctacgtcgtcgacctctccaacgagcgcgccatgtccctcaccatcgagccccgccccgtcaagcagtcccgcaagttcgtccccggctgcttcgtctgcctcgagtcccgcacctgctcctccaacctcaccctcacctccggctccaagcacaagatctccttcctctgcgacgacctcacccgcctctggatgaacgtcgagaagaccatctcctgcaccgaccaccgctactgccagcgcaagtcctactccctccaggtcccctccgacatcctccacctccccgtcgagctccacgacttctcctggaagctcctcgtccccaaggaccgcctctccctcgtcctcgtccccgcccagaagctccagcagcacacccacgagaagccctgcaacacctccttctcctacctcgtcgcctccgccatcccctcccaggacctctacttcggctccttctgccccggcggctccatcaagcagatccaggtcaagcagaacatctccgtcaccctccgcaccttcgccccctccttccagcaggaggcctcccgccagggcctcaccgtctccttcatcccctacttcaaggaggagggcgtcttcaccgtcacccccgacaccaagtccaaggtctacctccgcacccccaactgggaccgcggcctcccctccctcacctccgtctcctggaacatctccgtcccccgcgaccaggtcgcctgcctcaccttcttcaaggagcgctccggcgtcgtctgccagaccggccgcgccttcatgatcatccaggagcagcgcacccgcgccgaggagatcttctccctcgacgaggacgtcctccccaagccctccttccaccaccactccttctgggtcaacatctccaactgctcccccacctccggcaagcagctcgacctcctcttctccgtcaccctcaccccccgcaccgtcgacctcaccgtcatcctcatcgccgccgtcggcggcggcgtcctcctcctctccgccctcggcctcatcatctgctgcgtcaagaagaagaagaagaagaccaacaagggccccgccgtcggcatctacaacgacaacatcaacaccgagatgccccgccagcccaagaagttccagaagggccgcaaggacaacgactcccacgtctacgccgtcatcgaggacaccatggtctacggccacctcctccaggactcctccggctccttcctccagcccgaggtcgacacctaccgccccttccagggcaccatgggcgtctgccccccctccccccccaccatctgctcccgcgcccccaccgccaagctcgccaccgaggagccccccccccgctccccccccgagtccgagtccgagccctacaccttctcccaccccaacaacggcgacgtctcctccaaggacaccgacatccccctcctcaacacccaggagcccatggagcccgccgagtga

SEQ ID NO: 9365 - RNA, 2511 nt, synthetic construct
  misc_feature 1..2511: note = derived and/or modified sequence opt3 fromSrc-Kinases__Homo_sapiens__AAO34538
  source 1..2511: mol_type = other RNA
atggccggcctgaactgcggggtgagcatcgctctccttggagtcctgttgttaggtgcagccagactgcccaggggcgcggaggctttcgaaattgccctacctcgggagtccaatataaccgttctcatcaagctggggacaccaactcttctggcaaaaccgtgttacattgtgatctctaagcgccacattacgatgttgtcaatcaaaagtggagaacgaatagtatttaccttcagctgccagtcccccgagaaccattttgtgatcgaaattcaaaagaatatcgactgtatgtctggcccttgcccattcggtgaggtccagctccagccctcgacatcactgctgcctactctcaaccgtacctttatttgggatgtgaaagcccacaagagcatcgggttagagctgcagttcagtataccaagacttaggcaaattggacccggcgaatcctgtcctgacggcgttacacattctatcagcgggcggattgatgctaccgtggtccgcatcggaactttttgctccaatggtacagtgtcaagaatcaagatgcaggagggcgtaaaaatggcattgcatctgccatggttccacccgaggaacgttagtgggtttagcattgccaatcggtcttccataaagcgcctatgtatcattgaatcagtgttcgagggagagggcagcgctaccctcatgagtgccaactatcccgaaggttttcctgaggacgaactgatgacgtggcagttcgtcgtgccagcgcaccttcgagcatctgtgtcctttctgaatttcaacttgagcaattgcgagagaaaagaagagagggtcgagtactatatccccgggtcgactaccaaccctgaagttttcaagctcgaggataaacagccaggaaatatggccggcaactttaatctgtctttacaaggctgtgaccaggatgctcagtcccccgggatactgcggctccagttccaagtgcttgtacagcacccgcagaacgaatcaaacaagatttacgtggtcgacctgagtaatgagcgtgccatgagcttgacaatcgaacctcgccccgtgaagcaatccagaaaatttgttccaggatgcttcgtgtgtctagagtctaggacttgcagctcaaacctgaccctcacaagtggttccaagcataaaatcagctttctgtgcgatgaccttacccggctgtggatgaatgtcgagaagacgatttcttgtactgatcaccgatattgccagcgcaaatcatacagtctccaggtgcctagcgacatcttgcatctgcccgtagaattacacgatttctcctggaagctgctagttccaaaagacagactctctctggtgcttgtccccgcacagaagttgcaacagcacacacatgagaagccttgtaacacctcgtttagctatctggtggcttccgccattccatcacaggacctctacttcggcagtttttgccccgggggatctataaaacagatccaagtcaagcagaatattagcgtgactctgaggacattcgcgccctcctttcagcaggaagcctcacggcaaggccttaccgttagcttcatcccttactttaaagaggaaggtgtgttcacggtaaccccagatacaaagtctaaagtctatctgcgcactcccaactgggacagagggttgccttccctcaccagtgtgagctggaatatctctgttccaagggatcaggtggcatgtctgacattctttaaggagcgttccggcgtcgtgtgccagactggacgggctttcatgattatacaggagcaacgaaccagagccgaagagatcttttcattagacgaagatgtactgcccaagccgagtttccaccatcacagcttttgggtgaacatttcgaattgttcccctacatctggcaaacagctagacctcctgttcagcgttacccttactccaaggacggtcgatttgacagtgatcctgattgctgccgtcgggggaggtgtgctcctgttatcagcactgggccttatcatatgctgtgttaagaaaaagaaaaagaagaccaacaaagggcccgccgtgggaatctacaatgacaacattaatactgagatgcctcgccagcccaagaaatttcaaaagggccggaaagataacgacagtcatgtgtatgctgtaatcgaggataccatggtctacggtcacttgctccaggactcctctgggagcttcctgcagccagaagtggacacatatagaccttttcagggcaccatgggagtttgcccgccatccccgcctactatttgttcaagggcgcccacagcaaagctagccacggaggaaccaccccctcgcagcccacccgagagtgaatctgagccttacaccttctcccacccgaataacggcgatgtgagctcgaaggacactgatatcccactgctcaacacacaagagcccatggaacctgctgagtga

SEQ ID NO: 9366 - RNA, 2511 nt, synthetic construct
  misc_feature 1..2511: note = derived and/or modified sequence opt4 fromSrc-Kinases__Homo_sapiens__AAO34538
  source 1..2511: mol_type = other RNA
atggccggcctgaactgcggcgtgagcatcgccctgctgggcgtgctgctgctgggcgccgccagactgcccagaggcgccgaggccttcgagatcgccctgcccagagagagcaacatcaccgtgctgatcaagctgggcacccccaccctgctggccaagccctgctacatcgtgatcagcaagagacacatcaccatgctgagcatcaagagcggcgagagaatcgtgttcaccttcagctgccagagccccgagaaccacttcgtgatcgagatccagaagaacatcgactgcatgagcggcccctgccccttcggcgaggtgcagctgcagcccagcaccagcctgctgcccaccctgaacagaaccttcatctgggacgtgaaggcccacaagagcatcggcctggagctgcagttcagcatccccagactgagacagatcggccccggcgagagctgccccgacggcgtgacccacagcatcagcggcagaatcgacgccaccgtggtgagaatcggcaccttctgcagcaacggcaccgtgagcagaatcaagatgcaggagggcgtgaagatggccctgcacctgccctggttccaccccagaaacgtgagcggcttcagcatcgccaacagaagcagcatcaagagactgtgcatcatcgagagcgtgttcgagggcgagggcagcgccaccctgatgagcgccaactaccccgagggcttccccgaggacgagctgatgacctggcagttcgtggtgcccgcccacctgagagccagcgtgagcttcctgaacttcaacctgagcaactgcgagagaaaggaggagagagtggagtactacatccccggcagcaccaccaaccccgaggtgttcaagctggaggacaagcagcccggcaacatggccggcaacttcaacctgagcctgcagggctgcgaccaggacgcccagagccccggcatcctgagactgcagttccaggtgctggtgcagcacccccagaacgagagcaacaagatctacgtggtggacctgagcaacgagagagccatgagcctgaccatcgagcccagacccgtgaagcagagcagaaagttcgtgcccggctgcttcgtgtgcctggagagcagaacctgcagcagcaacctgaccctgaccagcggcagcaagcacaagatcagcttcctgtgcgacgacctgaccagactgtggatgaacgtggagaagaccatcagctgcaccgaccacagatactgccagagaaagagctacagcctgcaggtgcccagcgacatcctgcacctgcccgtggagctgcacgacttcagctggaagctgctggtgcccaaggacagactgagcctggtgctggtgcccgcccagaagctgcagcagcacacccacgagaagccctgcaacaccagcttcagctacctggtggccagcgccatccccagccaggacctgtacttcggcagcttctgccccggcggcagcatcaagcagatccaggtgaagcagaacatcagcgtgaccctgagaaccttcgcccccagcttccagcaggaggccagcagacagggcctgaccgtgagcttcatcccctacttcaaggaggagggcgtgttcaccgtgacccccgacaccaagagcaaggtgtacctgagaacccccaactgggacagaggcctgcccagcctgaccagcgtgagctggaacatcagcgtgcccagagaccaggtggcctgcctgaccttcttcaaggagagaagcggcgtggtgtgccagaccggcagagccttcatgatcatccaggagcagagaaccagagccgaggagatcttcagcctggacgaggacgtgctgcccaagcccagcttccaccaccacagcttctgggtgaacatcagcaactgcagccccaccagcggcaagcagctggacctgctgttcagcgtgaccctgacccccagaaccgtggacctgaccgtgatcctgatcgccgccgtgggcggcggcgtgctgctgctgagcgccctgggcctgatcatctgctgcgtgaagaagaagaagaagaagaccaacaagggccccgccgtgggcatctacaacgacaacatcaacaccgagatgcccagacagcccaagaagttccagaagggcagaaaggacaacgacagccacgtgtacgccgtgatcgaggacaccatggtgtacggccacctgctgcaggacagcagcggcagcttcctgcagcccgaggtggacacctacagacccttccagggcaccatgggcgtgtgcccccccagcccccccaccatctgcagcagagcccccaccgccaagctggccaccgaggagcccccccccagaagcccccccgagagcgagagcgagccctacaccttcagccaccccaacaacggcgacgtgagcagcaaggacaccgacatccccctgctgaacacccaggagcccatggagcccgccgagtga

SEQ ID NO: 9367 - RNA, 2511 nt, synthetic construct
  misc_feature 1..2511: note = derived and/or modified sequence opt5 fromSrc-Kinases__Homo_sapiens__AAO34538
  source 1..2511: mol_type = other RNA
atggccggcctgaactgcggggtgagcatcgctctcctgggagtccttctgctcggcgccgcgagactgccccggggagctgaggccttcgaaattgcccttcctcgcgagtccaatatcaccgttctgattaagctcggaacaccgacgctgctggctaaaccctgttacatcgtgatttctaagagacacatcaccatgctcagcatcaaatccggcgaacggattgtgtttacattctcttgccagagccctgagaaccactttgtcatcgaaattcaaaagaatatcgactgtatgtccgggccctgccctttcggagaggtgcagctgcagccctctaccagccttctgcctacactcaaccgcacctttatttgggatgttaaagcccacaagtccatcggcctggagcttcagttcagcattccgagactgcggcaaatcggccccggggaatcttgtcctgacggagtgacacattccatcagcggccgcattgatgctaccgtcgtgagaatcgggacgttttgctctaatggaaccgtttcccggattaagatgcaggagggcgtgaaaatggccctccatctgccctggttccaccctcgcaacgtcagcgggttttctatcgcgaatagatccagcattaagcggctgtgtatcatcgaatccgtgttcgagggagagggctctgccacactcatgagcgctaactatcccgaaggctttccggaggacgaactgatgacctggcagttcgtggtccctgcccaccttcgcgcttccgttagctttctgaatttcaacctctctaattgcgagagaaaagaggaacgggtggagtactatattcccgggtccacaaccaaccctgaagtgttcaagctggaggataaacagcccggaaatatggccggcaactttaatcttagcctgcaagggtgtgaccaggatgcgcagtctcccggaatcctccgcctgcagttccaagtcctggtgcagcaccctcagaacgaaagcaacaagatttacgttgtggacctctccaatgagagagccatgtctctgacgatcgaaccgcggcccgtcaagcaaagcagaaaatttgtgcctggctgcttcgtttgtcttgagtcccgcacatgcagctctaacctgaccctcacatccgggagcaagcataaaatttcttttctgtgcgatgaccttacccggctgtggatgaatgtggagaagaccatctcctgtacagatcacagatattgccagcgcaaaagctactccctccaggtcccctctgacatcctgcatctgcctgtggaactccacgatttcagctggaagctgcttgtccccaaagaccggctgtccctcgtgctggttccggctcagaagctgcaacagcacacgcatgagaagccttgtaacacctcttttagctatcttgtggcctccgctattcccagccaggacctctacttcggatctttttgccctggcggctccatcaaacagattcaagtcaagcagaatatcagcgtgacactgagaaccttcgccccctcttttcagcaggaagcctcccgccaagggctgacagttagcttcattccttactttaaagaggaaggagtgttcaccgtcacgcccgatacaaagtctaaagtgtatctccggaccccgaactgggacagaggcctgcctagccttacctccgtgagctggaatatctctgttccccgcgatcaggtcgcttgtctgacattctttaaggagcggtccggggtggtgtgccagaccgggagagcgttcatgattatccaggagcaacgcacacgggccgaagagatctttagcctcgacgaagatgtcctgcccaagccttccttccaccatcactctttttgggtgaacattagcaattgttccccgacgtctggcaaacagctggaccttctcttcagcgttaccctgacacccagaaccgtggatctgacagtcatcctcattgctgccgtgggaggcggagttctgcttctgtccgccctcggcctgatcatttgctgtgtgaagaaaaagaaaaagaagaccaacaaagggcctgctgtcggaatctacaatgacaacatcaatacggagatgccccggcagcctaagaaatttcaaaagggccgcaaagataacgactctcatgtgtatgccgttattgaggataccatggtgtacgggcatctgcttcaggacagctccgggagcttcctccagcccgaagtcgacacatatagaccttttcagggcaccatgggggtgtgtcccccgtctcctcccacaatctgctcccgggcgcctaccgctaagctggccacggaggaacccccgcctagatctccccctgagagcgaatccgagccctacacattcagccaccccaataacggcgatgtgtcttccaaggacaccgatattcctctgctcaacacacaagagccgatggaacccgccgagtga

SEQ ID NO: 9368 - protein, 248 aa, synthetic construct
  REGION 1..248: note = Surfactant_protein_A__Homo_sapiens__Q8IWL1
MWLCPLALNLILMAASGAACEVKDVCVGSPGIPGTPGSHGLPGRDGRDGVKGDPGPPGPMGPPGETPCPPGNNGLPGAPGVPGERGEKGEAGERGPPGLPAHLDEELQATLHDFRHQILQTRGALSLQGSIMTVGEKVFSSNGQSITFDAIQEACARAGGRIAVPRNPEENEAIASFVKKYNTYAYVGLTEGPSPGDFRYSDGTPVNYTNWYRGEPAGRGKEQCVEMYTDGQWNDRNCLYSRLTICEF

SEQ ID NO: 9369 - RNA, 747 nt, synthetic construct
  misc_feature 1..747: note = Surfactant_protein_A__Homo_sapiens__AAI57867
  source 1..747: mol_type = other RNA
atgtggctgtgccctctggccctcaacctcatcttgatggcagcctctggtgctgcgtgcgaagtgaaggacgtttgtgttggaagccctggtatccccggcactcctggatcccacggcctgccaggcagggacgggagagatggtgtcaaaggagaccctggccctccaggccccatgggtccgcctggagaaacaccatgtcctcctgggaataatgggctgcctggagcccctggtgtccctggagagcgtggagagaagggggaggctggcgagagaggccctccagggcttccagctcatctagatgaggagctccaagccacactccacgacttcagacatcaaatcctgcagacaaggggagccctcagtctgcagggctccataatgacagtaggagagaaggtcttctccagcaatgggcagtccatcacttttgatgccattcaggaggcatgtgccagagcaggcggccgcattgctgtcccaaggaatccagaggaaaatgaggccattgcaagcttcgtgaagaagtacaacacatatgcctatgtaggcctgactgagggtcccagccctggagacttccgctactcagatgggacccctgtaaactacaccaactggtaccgaggggagcctgcaggtcggggaaaagagcagtgtgtggagatgtacacagatgggcagtggaatgacaggaactgcctgtactcccgactgaccatctgtgagttctga

SEQ ID NO: 9370 - RNA, 747 nt, synthetic construct
  misc_feature 1..747: note = derived and/or modified sequence opt1 fromSurfactant_protein_A__Homo_sapiens__AAI57867
  source 1..747: mol_type = other RNA
atgtggctgtgccccctcgccctgaacctgatcctcatggccgcgagcggcgccgcctgcgaggtgaaggacgtctgcgtggggtccccgggcatccccgggacccccggcagccacgggctgcccggccgcgacggccgggacggggtgaagggcgacccggggccgcccggccccatggggccgcccggcgagaccccctgcccgcccggcaacaacgggctgcccggcgcccccggggtccccggcgagcgcggcgagaagggggaggccggcgagcgggggccgcccggcctccccgcgcacctggacgaggagctgcaggccacgctccacgacttccgccaccagatcctgcagacccgcggggccctgtccctccagggcagcatcatgaccgtgggcgagaaggtgttctccagcaacgggcagtccatcaccttcgacgccatccaggaggcgtgcgcccgggccggcgggcggatcgccgtcccccgcaaccccgaggagaacgaggccatcgcgagcttcgtgaagaagtacaacacgtacgcctacgtgggcctgaccgaggggccctcccccggcgacttccggtacagcgacggcacccccgtcaactacaccaactggtaccgcggggagccggccggccgggggaaggagcagtgcgtggagatgtacacggacggccagtggaacgaccgcaactgcctgtactcccggctcaccatctgcgagttctga

SEQ ID NO: 9371 - RNA, 747 nt, synthetic construct
  misc_feature 1..747: note = derived and/or modified sequence opt2 fromSurfactant_protein_A__Homo_sapiens__AAI57867
  source 1..747: mol_type = other RNA
atgtggctctgccccctcgccctcaacctcatcctcatggccgcctccggcgccgcctgcgaggtcaaggacgtctgcgtcggctcccccggcatccccggcacccccggctcccacggcctccccggccgcgacggccgcgacggcgtcaagggcgaccccggcccccccggccccatgggcccccccggcgagaccccctgcccccccggcaacaacggcctccccggcgcccccggcgtccccggcgagcgcggcgagaagggcgaggccggcgagcgcggcccccccggcctccccgcccacctcgacgaggagctccaggccaccctccacgacttccgccaccagatcctccagacccgcggcgccctctccctccagggctccatcatgaccgtcggcgagaaggtcttctcctccaacggccagtccatcaccttcgacgccatccaggaggcctgcgcccgcgccggcggccgcatcgccgtcccccgcaaccccgaggagaacgaggccatcgcctccttcgtcaagaagtacaacacctacgcctacgtcggcctcaccgagggcccctcccccggcgacttccgctactccgacggcacccccgtcaactacaccaactggtaccgcggcgagcccgccggccgcggcaaggagcagtgcgtcgagatgtacaccgacggccagtggaacgaccgcaactgcctctactcccgcctcaccatctgcgagttctga

SEQ ID NO: 9372 - RNA, 747 nt, synthetic construct
  misc_feature 1..747: note = derived and/or modified sequence opt3 fromSurfactant_protein_A__Homo_sapiens__AAI57867
  source 1..747: mol_type = other RNA
atgtggctgtgccccctcgcccttaacctgatcttgatggctgcaagcggcgccgcgtgtgaggtgaaggacgtctgcgttgggtcccctggtattccaggaaccccgggctctcacgggttacccggaagagatggcagggacggtgtgaaaggggatcctggaccacccggccctatgggcccacccggggaaacaccttgtccaccgggaaataacggtctgcccggcgctcctggggtaccaggagagcggggcgaaaagggtgaggccggggaacgcggaccccctggcctaccagcacatctcgacgaggagctgcaggccactcttcacgatttccgacatcaaatactgcagacgcgtggcgctttgtcactccaggggagtatcatgaccgtgggagaaaaagtctttagctccaatggtcagtctattacattcgacgcaatccaagaggcctgcgctagagccggcgggaggattgcggtgccccggaacccggaagagaatgaggcaatcgcctcgtttgttaagaaatacaacacttatgcttacgtgggactgaccgaaggcccttcacccggtgatttccgctatagcgacgggacaccagtcaattacaccaactggtatagaggcgagcctgccggaaggggcaaggaacagtgtgtggagatgtacactgatgggcagtggaatgaccggaactgcctgtatagtcgcctcacaatatgtgaattttga

SEQ ID NO: 9373 - RNA, 747 nt, synthetic construct
  misc_feature 1..747: note = derived and/or modified sequence opt4 fromSurfactant_protein_A__Homo_sapiens__AAI57867
  source 1..747: mol_type = other RNA
atgtggctgtgccccctggccctgaacctgatcctgatggccgccagcggcgccgcctgcgaggtgaaggacgtgtgcgtgggcagccccggcatccccggcacccccggcagccacggcctgcccggcagagacggcagagacggcgtgaagggcgaccccggcccccccggccccatgggcccccccggcgagaccccctgcccccccggcaacaacggcctgcccggcgcccccggcgtgcccggcgagagaggcgagaagggcgaggccggcgagagaggcccccccggcctgcccgcccacctggacgaggagctgcaggccaccctgcacgacttcagacaccagatcctgcagaccagaggcgccctgagcctgcagggcagcatcatgaccgtgggcgagaaggtgttcagcagcaacggccagagcatcaccttcgacgccatccaggaggcctgcgccagagccggcggcagaatcgccgtgcccagaaaccccgaggagaacgaggccatcgccagcttcgtgaagaagtacaacacctacgcctacgtgggcctgaccgagggccccagccccggcgacttcagatacagcgacggcacccccgtgaactacaccaactggtacagaggcgagcccgccggcagaggcaaggagcagtgcgtggagatgtacaccgacggccagtggaacgacagaaactgcctgtacagcagactgaccatctgcgagttctga

SEQ ID NO: 9374 - RNA, 747 nt, synthetic construct
  misc_feature 1..747: note = derived and/or modified sequence opt5 fromSurfactant_protein_A__Homo_sapiens__AAI57867
  source 1..747: mol_type = other RNA
atgtggctgtgccccctcgccctgaaccttatcctgatggctgccagcggcgcggcttgtgaggtgaaggacgtctgcgttgggtcccctgggattccgggcacccccgggtctcacggactccctggcagagatgggcgggacggagtgaaaggcgatcccggccctcccgggcctatgggaccgcccggcgaaacaccttgtccccctgggaataacggactgcccggcgccccgggggtgcctggagagcgcggcgaaaagggcgaggccggggaaagaggaccccctggccttcccgctcatctggacgaggagctccaggccacgctgcacgatttccggcatcaaatcctgcagacccgcggggctctcagcctgcagggatccattatgacagtcggcgaaaaagtgttttctagcaatgggcagtccatcaccttcgacgccattcaagaggcgtgcgccagagctggaggccggatcgccgttccccgcaaccctgaagagaatgaggctatcgcctcttttgtgaagaaatacaacacatatgcgtacgtcggccttaccgaagggccgagccccggagatttcagatattccgacggcacacctgtgaattacaccaactggtatcggggagagcccgccggacgcggcaaggaacagtgtgttgagatgtacacggatgggcagtggaatgacagaaactgcctgtatagccggctcaccatttgtgaattttga

SEQ ID NO: 9375 - protein, 248 aa, synthetic construct
  REGION 1..248: note = Surfactant_protein_A__Homo_sapiens__Q8IWL2
MWLCPLALNLILMAASGAVCEVKDVCVGSPGIPGTPGSHGLPGRDGRDGLKGDPGPPGPMGPPGEMPCPPGNDGLPGAPGIPGECGEKGEPGERGPPGLPAHLDEELQATLHDFRHQILQTRGALSLQGSIMTVGEKVFSSNGQSITFDAIQEACARAGGRIAVPRNPEENEAIASFVKKYNTYAYVGLTEGPSPGDFRYSDGTPVNYTNWYRGEPAGRGKEQCVEMYTDGQWNDRNCLYSRLTICEF

SEQ ID NO: 9376 - RNA, 747 nt, synthetic construct
  misc_feature 1..747: note = Surfactant_protein_A__Homo_sapiens__AAI11571
  source 1..747: mol_type = other RNA
atgtggctgtgccctctggccctcaacctcatcttgatggcagcctctggtgctgtgtgcgaagtgaaggacgtttgtgttggaagccctggtatccccggcactcctggatcccacggcctgccaggcagggacgggagagatggtctcaaaggagaccctggccctccaggccccatgggtccacctggagaaatgccatgtcctcctggaaatgatgggctgcctggagcccctggtatccctggagagtgtggagagaagggggagcctggcgagaggggccctccagggcttccagctcatctagatgaggagctccaagccacactccacgactttagacatcaaatcctgcagacaaggggagccctcagtctgcagggctccataatgacagtaggagagaaggtcttctccagcaatgggcagtccatcacttttgatgccattcaggaggcatgtgccagagcaggcggccgcattgctgtcccaaggaatccagaggaaaatgaggccattgcaagcttcgtgaagaagtacaacacatatgcctatgtaggcctgactgagggtcccagccctggagacttccgctactcagacgggacccctgtaaactacaccaactggtaccgaggggagcccgcaggtcggggaaaagagcagtgtgtggagatgtacacagatgggcagtggaatgacaggaactgcctgtactcccgactgaccatctgtgagttctga

SEQ ID NO: 9377 - RNA, 747 nt, synthetic construct
  misc_feature 1..747: note = derived and/or modified sequence opt1 fromSurfactant_protein_A__Homo_sapiens__AAI11571
  source 1..747: mol_type = other RNA
atgtggctgtgccccctcgccctgaacctgatcctcatggccgcgagcggcgccgtgtgcgaggtcaaggacgtgtgcgtggggtccccgggcatccccgggacccccggcagccacgggctgcccggccgcgacggccgggacgggctgaagggcgacccggggccgcccggccccatggggccgcccggcgagatgccctgcccgcccggcaacgacgggctccccggcgcccccgggatccccggcgagtgcggcgagaagggggagcccggcgagcgcgggccgcccggcctgcccgcccacctggacgaggagctccaggccaccctgcacgacttccggcaccagatcctgcagacgcgcggggcgctctccctgcagggcagcatcatgaccgtcggcgagaaggtgttctccagcaacgggcagtccatcaccttcgacgccatccaggaggcctgcgcccgggcgggcgggcgcatcgccgtgccccggaaccccgaggagaacgaggccatcgccagcttcgtcaagaagtacaacacctacgcctacgtgggcctgacggaggggccctcccccggcgacttccgctacagcgacggcaccccggtgaactacaccaactggtaccgcggggagcccgcgggccgggggaaggagcagtgcgtcgagatgtacaccgacggccagtggaacgaccggaactgcctctactcccgcctgacgatctgcgagttctga

SEQ ID NO: 9378 - RNA, 747 nt, synthetic construct
  misc_feature 1..747: note = derived and/or modified sequence opt2 fromSurfactant_protein_A__Homo_sapiens__AAI11571
  source 1..747: mol_type = other RNA
atgtggctctgccccctcgccctcaacctcatcctcatggccgcctccggcgccgtctgcgaggtcaaggacgtctgcgtcggctcccccggcatccccggcacccccggctcccacggcctccccggccgcgacggccgcgacggcctcaagggcgaccccggcccccccggccccatgggcccccccggcgagatgccctgcccccccggcaacgacggcctccccggcgcccccggcatccccggcgagtgcggcgagaagggcgagcccggcgagcgcggcccccccggcctccccgcccacctcgacgaggagctccaggccaccctccacgacttccgccaccagatcctccagacccgcggcgccctctccctccagggctccatcatgaccgtcggcgagaaggtcttctcctccaacggccagtccatcaccttcgacgccatccaggaggcctgcgcccgcgccggcggccgcatcgccgtcccccgcaaccccgaggagaacgaggccatcgcctccttcgtcaagaagtacaacacctacgcctacgtcggcctcaccgagggcccctcccccggcgacttccgctactccgacggcacccccgtcaactacaccaactggtaccgcggcgagcccgccggccgcggcaaggagcagtgcgtcgagatgtacaccgacggccagtggaacgaccgcaactgcctctactcccgcctcaccatctgcgagttctga

SEQ ID NO: 9379 - RNA, 747 nt, synthetic construct
  misc_feature 1..747: note = derived and/or modified sequence opt3 fromSurfactant_protein_A__Homo_sapiens__AAI11571
  source 1..747: mol_type = other RNA
atgtggctgtgccccctcgcccttaacctgatcttgatggctgcaagcggcgccgtgtgtgaggtcaaggacgtttgcgtggggtcccctggtattccaggaaccccgggctctcacgggttacccggaagagatggcagggacggtctgaaaggggatcctggaccacccggccctatgggcccacccggggaaatgccttgtccaccgggaaatgacggtctacccggcgcgcctgggataccaggagagtgcggcgaaaagggtgagcccggggaacggggacctccaggcctccccgctcatctggatgaggagcttcaggccacactgcacgacttccgccatcaaatcttgcagactcgaggcgcactctcactgcaggggagtattatgacggtaggagaaaaagtgtttagctccaacggtcagtctatcaccttcgatgccattcaagaggcttgtgcacgtgccggcgggagaatcgctgtcccgaggaatcctgaagagaacgaggccatagcgtcgtttgtgaagaaatacaatacatatgcatacgttggactgactgaaggcccctcaccaggtgacttccggtatagcgatgggacccctgtgaactacacaaattggtatcgcggcgagcccgccggaagaggcaaggaacagtgcgtcgagatgtacaccgacgggcagtggaacgataggaattgtctctatagtcggttaactatctgcgaattttga

SEQ ID NO: 9380 - RNA, 747 nt, synthetic construct
  misc_feature 1..747: note = derived and/or modified sequence opt4 fromSurfactant_protein_A__Homo_sapiens__AAI11571
  source 1..747: mol_type = other RNA
atgtggctgtgccccctggccctgaacctgatcctgatggccgccagcggcgccgtgtgcgaggtgaaggacgtgtgcgtgggcagccccggcatccccggcacccccggcagccacggcctgcccggcagagacggcagagacggcctgaagggcgaccccggcccccccggccccatgggcccccccggcgagatgccctgcccccccggcaacgacggcctgcccggcgcccccggcatccccggcgagtgcggcgagaagggcgagcccggcgagagaggcccccccggcctgcccgcccacctggacgaggagctgcaggccaccctgcacgacttcagacaccagatcctgcagaccagaggcgccctgagcctgcagggcagcatcatgaccgtgggcgagaaggtgttcagcagcaacggccagagcatcaccttcgacgccatccaggaggcctgcgccagagccggcggcagaatcgccgtgcccagaaaccccgaggagaacgaggccatcgccagcttcgtgaagaagtacaacacctacgcctacgtgggcctgaccgagggccccagccccggcgacttcagatacagcgacggcacccccgtgaactacaccaactggtacagaggcgagcccgccggcagaggcaaggagcagtgcgtggagatgtacaccgacggccagtggaacgacagaaactgcctgtacagcagactgaccatctgcgagttctga

SEQ ID NO: 9381 - RNA, 747 nt, synthetic construct
  misc_feature 1..747: note = derived and/or modified sequence opt5 fromSurfactant_protein_A__Homo_sapiens__AAI11571
  source 1..747: mol_type = other RNA
atgtggctgtgccccctcgccctgaaccttatcctgatggctgccagcggcgcggtgtgtgaggtcaaggacgtttgcgtggggtcccctgggattccgggcacccccgggtctcacggactccctggcagagatgggcgggacggactgaaaggcgatcccggccctcccgggcctatgggaccgcccggcgaaatgccttgtccccctgggaatgacggacttcccggcgctccggggatccctggagagtgcggcgaaaagggcgagcccggggaacgcggacctcccggcctgcccgcccatctcgatgaggagctgcaggccacactgcacgacttcagacatcaaattctccagacgcggggagctctgagccttcagggatccatcatgaccgtgggcgaaaaagtcttttctagcaacgggcagtccattacattcgatgccatccaagaggcttgtgcccgcgcgggaggcagaatcgccgtgcctcggaatccggaagagaacgaggctattgcctcttttgttaagaaatacaatacctatgcttacgtgggcctgacagaagggcccagccctggagacttccgctattccgatggcacccccgtcaactacacaaattggtatagaggggagcctgccggacggggcaaggaacagtgcgtggagatgtacaccgacgggcagtggaacgatcgcaattgtctctatagcagactgacgatctgcgaattttga

SEQ ID NO: 9382 - protein, 375 aa, synthetic construct
  REGION 1..375: note = Surfactant_protein_D__Homo_sapiens__P35247
MLLFLLSALVLLTQPLGYLEAEMKTYSHRTMPSACTLVMCSSVESGLPGRDGRDGREGPRGEKGDPGLPGAAGQAGMPGQAGPVGPKGDNGSVGEPGPKGDTGPSGPPGPPGVPGPAGREGPLGKQGNIGPQGKPGPKGEAGPKGEVGAPGMQGSAGARGLAGPKGERGVPGERGVPGNTGAAGSAGAMGPQGSPGARGPPGLKGDKGIPGDKGAKGESGLPDVASLRQQVEALQGQVQHLQAAFSQYKKVELFPNGQSVGEKIFKTAGFVKPFTEAQLLCTQAGGQLASPRSAAENAALQQLVVAKNEAAFLSMTDSKTEGKFTYPTGESLVYSNWAPGEPNDDGGSEDCVEIFTNGKWNDRACGEKRLVVCEF

SEQ ID NO: 9383 - RNA, 1128 nt, synthetic construct
  misc_feature 1..1128: note = Surfactant_protein_D__Homo_sapiens__CCDS7362.1
  source 1..1128: mol_type = other RNA
atgctgctcttcctcctctctgcactggtcctgctcacacagcccctgggctacctggaagcagaaatgaagacctactcccacagaacaatgcccagtgcttgcaccctggtcatgtgtagctcagtggagagtggcctgcctggtcgcgatggacgggatgggagagagggccctcggggcgagaagggggacccaggtttgccaggagctgcagggcaagcagggatgcctggacaagctggcccagttgggcccaaaggggacaatggctctgttggagaacctggaccaaagggagacactgggccaagtggacctccaggacctcccggtgtgcctggtccagctggaagagaaggtcccctggggaagcaggggaacataggacctcagggcaagccaggcccaaaaggagaagctgggcccaaaggagaagtaggtgccccaggcatgcagggctcggcaggggcaagaggcctcgcaggccctaagggagagcgaggtgtccctggtgagcgtggagtccctggaaacacaggggcagcagggtctgctggagccatgggtccccagggaagtccaggtgccaggggacccccgggattgaagggggacaaaggcattcctggagacaaaggagcaaagggagaaagtgggcttccagatgttgcttctctgaggcagcaggttgaggccttacagggacaagtacagcacctccaggctgctttctctcagtataagaaagttgagctcttcccaaatggccaaagtgtcggggagaagattttcaagacagcaggctttgtaaaaccatttacggaggcacagctgctgtgcacacaggctggtggacagttggcctctccacgctctgccgctgagaatgccgccttgcaacagctggtcgtagctaagaacgaggctgctttcctgagcatgactgattccaagacagagggcaagttcacctaccccacaggagagtccctggtctattccaactgggccccaggggagcccaacgatgatggcgggtcagaggactgtgtggagatcttcaccaatggcaagtggaatgacagggcttgtggagaaaagcgtcttgtggtctgcgagttctga

SEQ ID NO: 9384 - RNA, 1128 nt, synthetic construct
  misc_feature 1..1128: note = derived and/or modified sequence opt1 fromSurfactant_protein_D__Homo_sapiens__CCDS7362.1
  source 1..1128: mol_type = other RNA
atgctcctcttcctgctgagcgccctcgtgctgctgacccagcccctcggctacctggaggccgagatgaagacctactcccaccgcacgatgccgagcgcgtgcaccctggtcatgtgctccagcgtggagtccgggctccccggccgggacgggcgcgacggccgggaggggccccgcggcgagaagggcgaccccgggctgccgggcgccgccgggcaggccggcatgcccgggcaggccggccccgtgggccccaagggggacaacggcagcgtcggggagccgggccccaagggcgacaccgggccctccgggcccccggggccgcccggcgtgcccgggcccgcgggccgggagggccccctggggaagcagggcaacatcgggccccagggcaagcccgggccgaagggcgaggccggccccaagggggaggtgggcgcccccgggatgcagggcagcgccggggcgcgcggcctcgccggccccaagggggagcggggcgtcccgggggagcgcggcgtgcccggcaacaccggggccgccggctccgccggggcgatgggcccccaggggagccccggcgcccggggcccgcccgggctgaagggcgacaaggggatccccggcgacaagggggccaagggcgagtccggcctgccggacgtggccagcctccgccagcaggtcgaggccctgcagggccaggtgcagcacctccaggcggccttctcccagtacaagaaggtggagctgttccccaacggccagagcgtcggggagaagatcttcaagacggccggcttcgtgaagcccttcaccgaggcccagctgctgtgcacccaggccgggggccagctggcgagcccccggtccgccgccgagaacgccgccctgcagcagctggtggtcgcgaagaacgaggccgccttcctctccatgaccgacagcaagacggagggcaagttcacctacccgaccggggagtccctggtgtacagcaactgggcccccggcgagcccaacgacgacgggggcagcgaggactgcgtggagatcttcaccaacgggaagtggaacgaccgcgcgtgcggcgagaagcggctggtcgtgtgcgagttctga

SEQ ID NO: 9385 - RNA, 1128 nt, synthetic construct
  misc_feature 1..1128: note = derived and/or modified sequence opt2 fromSurfactant_protein_D__Homo_sapiens__CCDS7362.1
  source 1..1128: mol_type = other RNA
atgctcctcttcctcctctccgccctcgtcctcctcacccagcccctcggctacctcgaggccgagatgaagacctactcccaccgcaccatgccctccgcctgcaccctcgtcatgtgctcctccgtcgagtccggcctccccggccgcgacggccgcgacggccgcgagggcccccgcggcgagaagggcgaccccggcctccccggcgccgccggccaggccggcatgcccggccaggccggccccgtcggccccaagggcgacaacggctccgtcggcgagcccggccccaagggcgacaccggcccctccggcccccccggcccccccggcgtccccggccccgccggccgcgagggccccctcggcaagcagggcaacatcggcccccagggcaagcccggccccaagggcgaggccggccccaagggcgaggtcggcgcccccggcatgcagggctccgccggcgcccgcggcctcgccggccccaagggcgagcgcggcgtccccggcgagcgcggcgtccccggcaacaccggcgccgccggctccgccggcgccatgggcccccagggctcccccggcgcccgcggcccccccggcctcaagggcgacaagggcatccccggcgacaagggcgccaagggcgagtccggcctccccgacgtcgcctccctccgccagcaggtcgaggccctccagggccaggtccagcacctccaggccgccttctcccagtacaagaaggtcgagctcttccccaacggccagtccgtcggcgagaagatcttcaagaccgccggcttcgtcaagcccttcaccgaggcccagctcctctgcacccaggccggcggccagctcgcctccccccgctccgccgccgagaacgccgccctccagcagctcgtcgtcgccaagaacgaggccgccttcctctccatgaccgactccaagaccgagggcaagttcacctaccccaccggcgagtccctcgtctactccaactgggcccccggcgagcccaacgacgacggcggctccgaggactgcgtcgagatcttcaccaacggcaagtggaacgaccgcgcctgcggcgagaagcgcctcgtcgtctgcgagttctga

SEQ ID NO: 9386 - RNA, 1128 nt, synthetic construct
  misc_feature 1..1128: note = derived and/or modified sequence opt3 fromSurfactant_protein_D__Homo_sapiens__CCDS7362.1
  source 1..1128: mol_type = other RNA
atgctcctgttccttctgagcgccttggtgttactgacccagcccctaggctacctcgaggctgaaatgaagacatattcccacagaactatgccttctgcatgcacgctggtcatgtgttcaagtgttgagagcgggcttccaggaagggacggtcgggatggccgcgaagggccgcgaggagagaaaggcgaccccggtctgcctggggccgcgggacaagctggcatgccaggccaggccgggcccgtgggacctaagggtgataacggctccgtaggggaaccaggacccaaaggcgacaccggtccttctgggccaccgggaccccctggcgtgccaggccccgcagggcgtgagggacctttgggtaagcagggcaatatcgggccacagggaaaacccggcccgaagggtgaggccgggcctaagggcgaagtcggagctcccggcatgcaagggtcggcaggagccagaggtctcgctggcccaaaaggggagaggggagtgcctggcgaacggggtgttcccgggaacacaggcgccgcgggatcagcaggcgccatggggccacagggaagccccggtgctcgcggccctccagggctgaagggagataaaggcattccgggtgacaagggggccaaaggcgagagtggactgcccgatgtggcatccctcagacagcaggtcgaggctttacaaggccaggtgcagcatctgcaggccgcgttttctcaatacaagaaggtagaacttttccctaatgggcagagcgttggagagaaaatatttaagactgccggcttcgtgaaaccatttaccgaagcacagttgctgtgcacacaagctggtgggcagctagcctcccccaggtcagctgccgagaacgcagccctccagcagctggtcgtggctaagaatgaagcggcattccttagtatgaccgacagcaaaactgagggaaagtttacatatcctaccggcgagtctctggtgtactccaactgggccccaggtgaacccaatgatgacggcgggtcagaggattgtgtcgaaatcttcacgaacggaaaatggaatgaccgggcttgcggcgagaagcgcttggttgtgtgtgaattttga

SEQ ID NO: 9387 - RNA, 1128 nt, synthetic construct
  misc_feature 1..1128: note = derived and/or modified sequence opt4 fromSurfactant_protein_D__Homo_sapiens__CCDS7362.1
  source 1..1128: mol_type = other RNA
atgctgctgttcctgctgagcgccctggtgctgctgacccagcccctgggctacctggaggccgagatgaagacctacagccacagaaccatgcccagcgcctgcaccctggtgatgtgcagcagcgtggagagcggcctgcccggcagagacggcagagacggcagagagggccccagaggcgagaagggcgaccccggcctgcccggcgccgccggccaggccggcatgcccggccaggccggccccgtgggccccaagggcgacaacggcagcgtgggcgagcccggccccaagggcgacaccggccccagcggcccccccggcccccccggcgtgcccggccccgccggcagagagggccccctgggcaagcagggcaacatcggcccccagggcaagcccggccccaagggcgaggccggccccaagggcgaggtgggcgcccccggcatgcagggcagcgccggcgccagaggcctggccggccccaagggcgagagaggcgtgcccggcgagagaggcgtgcccggcaacaccggcgccgccggcagcgccggcgccatgggcccccagggcagccccggcgccagaggcccccccggcctgaagggcgacaagggcatccccggcgacaagggcgccaagggcgagagcggcctgcccgacgtggccagcctgagacagcaggtggaggccctgcagggccaggtgcagcacctgcaggccgccttcagccagtacaagaaggtggagctgttccccaacggccagagcgtgggcgagaagatcttcaagaccgccggcttcgtgaagcccttcaccgaggcccagctgctgtgcacccaggccggcggccagctggccagccccagaagcgccgccgagaacgccgccctgcagcagctggtggtggccaagaacgaggccgccttcctgagcatgaccgacagcaagaccgagggcaagttcacctaccccaccggcgagagcctggtgtacagcaactgggcccccggcgagcccaacgacgacggcggcagcgaggactgcgtggagatcttcaccaacggcaagtggaacgacagagcctgcggcgagaagagactggtggtgtgcgagttctga

SEQ ID NO: 9388 - RNA, 1128 nt, synthetic construct
  misc_feature 1..1128: note = derived and/or modified sequence opt5 fromSurfactant_protein_D__Homo_sapiens__CCDS7362.1
  source 1..1128: mol_type = other RNA
atgctcctgttcctgcttagcgccctggtgctcctgacccagccccttggctacctggaggctgaaatgaagacatattcccacagaacgatgccttctgcctgcaccctcgtcatgtgtagctccgttgagtctgggctgccgggacgggacggccgcgatgggagagaaggaccccggggcgagaaaggggaccctggactgcccggcgcggctggccaagccgggatgcctggacaggccggccccgtggggcctaagggagataacggcagcgtgggggaaccgggacccaaaggcgacacaggcccttccgggccccctggacccccgggcgtccctgggcccgctggacgcgagggccctctcgggaagcagggaaatatcggcccccagggcaaacccgggcctaagggagaggccggcccgaagggggaagtgggagctcccggcatgcaagggtctgccggcgcgagaggactggccggccctaaaggggagcggggagttcccggcgaacgcggggtgcctggaaacaccggcgctgccgggagcgctggcgccatgggaccccagggctccccgggggcgagaggacctcccggccttaagggggataaagggattcctggcgacaagggggccaaaggcgagagcggactgcccgatgtcgcttctctccggcaacaggtggaggccctgcagggccaggttcagcatcttcaggctgccttttcccaatacaagaaggtggaactgttccctaatgggcagagcgtcggagagaaaatctttaagacagccggcttcgtgaaaccctttaccgaagctcagctcctgtgcacacaagcgggaggacagctggcctctccgcgctccgctgccgagaacgccgctctccagcagctggtggtcgccaagaatgaagcggctttccttagcatgaccgactctaaaacggagggcaagtttacctatcctacaggggagtccctggtttacagcaactgggcccccggcgaacccaatgatgacggaggctccgaggattgtgtggaaattttcaccaacgggaaatggaatgacagagcctgcggagagaagcggctcgtggtctgtgaattttga

SEQ ID NO: 9389 - protein, 606 aa, synthetic construct
  REGION 1..606: note = TAK1__Homo_sapiens__O43318
MSTASAASSSSSSSAGEMIEAPSQVLNFEEIDYKEIEVEEVVGRGAFGVVCKAKWRAKDVAIKQIESESERKAFIVELRQLSRVNHPNIVKLYGACLNPVCLVMEYAEGGSLYNVLHGAEPLPYYTAAHAMSWCLQCSQGVAYLHSMQPKALIHRDLKPPNLLLVAGGTVLKICDFGTACDIQTHMTNNKGSAAWMAPEVFEGSNYSEKCDVFSWGIILWEVITRRKPFDEIGGPAFRIMWAVHNGTRPPLIKNLPKPIESLMTRCWSKDPSQRPSMEEIVKIMTHLMRYFPGADEPLQYPCQYSDEGQSNSATSTGSFMDIASTNTSNKSDTNMEQVPATNDTIKRLESKLLKNQAKQQSESGRLSLGASRGSSVESLPPTSEGKRMSADMSEIEARIAATTAYSKPKRGHRKTASFGNILDVPEIVISGNGQPRRRSIQDLTVTGTEPGQVSSRSSSPSVRMITTSGPTSEKPTRSHPWTPDDSTDTNGSDNSIPMAYLTLDHQLQPLAPCPNSKESMAVFEQHCKMAQEYMKVQTEIALLLQRKQELVAELDQDEKDQQNTSRLVQEHKKLLDENKSLSTYYQQCKKQLEVIRSQQQKRQGTS

SEQ ID NO: 9390 - RNA, 1821 nt, synthetic construct
  misc_feature 1..1821: note = TAK1__Homo_sapiens__ABC40734
  source 1..1821: mol_type = other RNA
atgtctacagcctctgccgcctcctcctcctcctcgtcttcggccggtgagatgatcgaagccccttcccaggtcctcaactttgaagagatcgactacaaggagatcgaggtggaagaggttgttggaagaggagcctttggagttgtttgcaaagctaagtggagagcaaaagatgttgctattaaacaaatagaaagtgaatctgagaggaaagcgtttattgtagagcttcggcagttatcccgtgtgaaccatcctaatattgtaaagctttatggagcctgcttgaatccagtgtgtcttgtgatggaatatgctgaagggggctctttatataatgtgctgcatggtgctgaaccattgccatattatactgctgcccacgcaatgagttggtgtttacagtgttcccaaggagtggcttatcttcacagcatgcaacccaaagcgctaattcacagggacctgaaaccaccaaacttactgctggttgcaggggggacagttctaaaaatttgtgattttggtacagcctgtgacattcagacacacatgaccaataacaaggggagtgctgcttggatggcacctgaagtttttgaaggtagtaattacagtgaaaaatgtgacgtcttcagctggggtattattctttgggaagtgataacgcgtcggaaaccctttgatgagattggtggcccagctttccgaatcatgtgggctgttcataatggtactcgaccaccactgataaaaaatttacctaagcccattgagagcctgatgactcgttgttggtctaaagatccttcccagcgcccttcaatggaggaaattgtgaaaataatgactcacttgatgcggtactttccaggagcagatgagccattacagtatccttgtcagtattcagatgaaggacagagcaactctgccaccagtacaggctcattcatggacattgcttctacaaatacgagtaacaaaagtgacactaatatggagcaagttcctgccacaaatgatactattaagcgcttagaatcaaaattgttgaaaaatcaggcaaagcaacagagtgaatctggacgtttaagcttgggagcctcccgtgggagcagtgtggagagcttgcccccaacctctgagggcaagaggatgagtgctgacatgtctgaaatagaagctaggatcgccgcaaccacagcctattccaagcctaaacggggccaccgtaaaactgcttcatttggcaacattctggatgtccctgagatcgtcatatcaggcaacggacagccaagacgtagatccatccaagacttgactgtaactggaacagaacctggtcaggtgagcagtaggtcatccagtcccagtgtcagaatgattactacctcaggaccaacctcagaaaagccaactcgaagtcatccatggacccctgatgattccacagataccaatggatcagataactccatcccaatggcttatcttacactggatcaccaactacagcctctagcaccgtgcccaaactccaaagaatctatggcagtgtttgaacagcattgtaaaatggcacaagaatatatgaaagttcaaacagaaattgcattgttattacagagaaagcaagaactagttgcagaactggaccaggatgaaaaggaccagcaaaatacatctcgcctggtacaggaacataaaaagcttttagatgaaaacaaaagcctttctacttactaccagcaatgcaaaaaacaactagaggtcatcagaagtcagcagcagaaacgacaaggcacttcatga

SEQ ID NO: 9391 - RNA, 1821 nt, synthetic construct
  misc_feature 1..1821: note = derived and/or modified sequence opt1 fromTAK1__Homo_sapiens__ABC40734
  source 1..1821: mol_type = other RNA
atgagcaccgcctccgccgcgagctccagctccagctccagcgccggcgagatgatcgaggccccctcccaggtgctgaacttcgaggagatcgactacaaggagatcgaggtcgaggaggtggtggggcgcggcgccttcggggtcgtgtgcaaggccaagtggcgggcgaaggacgtggccatcaagcagatcgagagcgagtccgagcgcaaggccttcatcgtcgagctccggcagctgagccgcgtgaaccacccgaacatcgtgaagctgtacggcgcctgcctcaaccccgtctgcctggtgatggagtacgcggagggcgggtccctgtacaacgtgctccacggcgccgagcccctgccctactacaccgccgcccacgccatgagctggtgcctgcagtgctcccagggggtcgcgtacctccacagcatgcagccgaaggccctgatccaccgggacctgaagccgcccaacctcctgctggtggccggcgggacggtgctcaagatctgcgacttcggcaccgcctgcgacatccagacccacatgaccaacaacaaggggtccgccgcgtggatggcccccgaggtcttcgagggcagcaactactccgagaagtgcgacgtgttcagctggggcatcatcctgtgggaggtgatcacgcgccggaagcccttcgacgagatcgggggccccgccttccgcatcatgtgggccgtccacaacgggacccggccgcccctgatcaagaacctccccaagcccatcgagagcctgatgacccgctgctggtccaaggaccccagccagcggccctccatggaggagatcgtgaagatcatgacccacctgatgcgctacttcccgggcgccgacgagcccctccagtacccctgccagtacagcgacgagggccagtccaacagcgcgacgtccaccgggagcttcatggacatcgcctccaccaacaccagcaacaagtccgacacgaacatggagcaggtccccgccaccaacgacaccatcaagcggctggagagcaagctgctcaagaaccaggccaagcagcagtccgagagcggccgcctgtccctgggggccagccggggctccagcgtggagtccctcccgcccaccagcgaggggaagcgcatgagcgcggacatgtccgagatcgaggcccggatcgccgccacgaccgcgtacagcaagcccaagcgcggccaccggaagaccgcctccttcggcaacatcctggacgtgcccgagatcgtgatcagcgggaacggccagccgcgccggcgctccatccaggacctgaccgtcacggggaccgagcccggccaggtgagctcccgcagctccagcccctccgtccggatgatcaccaccagcgggcccacgtccgagaagccgacccgcagccacccctggacccccgacgactccaccgacacgaacggcagcgacaactccatcccgatggcctacctcaccctggaccaccagctgcagcccctcgccccctgccccaacagcaaggagagcatggccgtgttcgagcagcactgcaagatggcgcaggagtacatgaaggtgcagaccgagatcgccctgctgctccagcggaagcaggagctggtcgccgagctggaccaggacgagaaggaccagcagaacacctcccgcctcgtgcaggagcacaagaagctgctggacgagaacaagagcctctccacgtactaccagcagtgcaagaagcagctggaggtgatccggagccagcagcagaagcgccagggcacctcctga

SEQ ID NO: 9392 - RNA, 1821 nt, synthetic construct
  misc_feature 1..1821: note = derived and/or modified sequence opt2 fromTAK1__Homo_sapiens__ABC40734
  source 1..1821: mol_type = other RNA
atgtccaccgcctccgccgcctcctcctcctcctcctcctccgccggcgagatgatcgaggccccctcccaggtcctcaacttcgaggagatcgactacaaggagatcgaggtcgaggaggtcgtcggccgcggcgccttcggcgtcgtctgcaaggccaagtggcgcgccaaggacgtcgccatcaagcagatcgagtccgagtccgagcgcaaggccttcatcgtcgagctccgccagctctcccgcgtcaaccaccccaacatcgtcaagctctacggcgcctgcctcaaccccgtctgcctcgtcatggagtacgccgagggcggctccctctacaacgtcctccacggcgccgagcccctcccctactacaccgccgcccacgccatgtcctggtgcctccagtgctcccagggcgtcgcctacctccactccatgcagcccaaggccctcatccaccgcgacctcaagccccccaacctcctcctcgtcgccggcggcaccgtcctcaagatctgcgacttcggcaccgcctgcgacatccagacccacatgaccaacaacaagggctccgccgcctggatggcccccgaggtcttcgagggctccaactactccgagaagtgcgacgtcttctcctggggcatcatcctctgggaggtcatcacccgccgcaagcccttcgacgagatcggcggccccgccttccgcatcatgtgggccgtccacaacggcacccgcccccccctcatcaagaacctccccaagcccatcgagtccctcatgacccgctgctggtccaaggacccctcccagcgcccctccatggaggagatcgtcaagatcatgacccacctcatgcgctacttccccggcgccgacgagcccctccagtacccctgccagtactccgacgagggccagtccaactccgccacctccaccggctccttcatggacatcgcctccaccaacacctccaacaagtccgacaccaacatggagcaggtccccgccaccaacgacaccatcaagcgcctcgagtccaagctcctcaagaaccaggccaagcagcagtccgagtccggccgcctctccctcggcgcctcccgcggctcctccgtcgagtccctcccccccacctccgagggcaagcgcatgtccgccgacatgtccgagatcgaggcccgcatcgccgccaccaccgcctactccaagcccaagcgcggccaccgcaagaccgcctccttcggcaacatcctcgacgtccccgagatcgtcatctccggcaacggccagccccgccgccgctccatccaggacctcaccgtcaccggcaccgagcccggccaggtctcctcccgctcctcctccccctccgtccgcatgatcaccacctccggccccacctccgagaagcccacccgctcccacccctggacccccgacgactccaccgacaccaacggctccgacaactccatccccatggcctacctcaccctcgaccaccagctccagcccctcgccccctgccccaactccaaggagtccatggccgtcttcgagcagcactgcaagatggcccaggagtacatgaaggtccagaccgagatcgccctcctcctccagcgcaagcaggagctcgtcgccgagctcgaccaggacgagaaggaccagcagaacacctcccgcctcgtccaggagcacaagaagctcctcgacgagaacaagtccctctccacctactaccagcagtgcaagaagcagctcgaggtcatccgctcccagcagcagaagcgccagggcacctcctga

SEQ ID NO: 9393 - RNA, 1821 nt, synthetic construct
  misc_feature 1..1821: note = derived and/or modified sequence opt3 fromTAK1__Homo_sapiens__ABC40734
  source 1..1821: mol_type = other RNA
atgagcaccgcctccgctgcatcttcaagtagctcctcttcggccggcgagatgatcgaagcgccctcacaggtgctgaacttcgaggaaattgactacaaggagatagaagtcgaggaggttgtggggagaggagcttttggtgtagtgtgcaaagccaagtggagggcaaaagatgtcgccatcaagcaaattgaaagcgagagtgaacggaaggctttcatcgtggagctccgccagctttcccgagttaatcaccctaacattgtgaaactgtatggcgcatgtttgaatccagtctgcttagtgatggagtacgccgaagggggatctctgtataacgtactacatggcgctgagccgctcccctactatacagccgcgcacgcaatgagctggtgtctgcagtgctcccagggtgttgcctaccttcattcaatgcaacctaaggctctgatccaccgtgacttgaaaccacccaatctcctgctggtggccgggggaactgtcctcaagatatgtgattttggcacggcatgcgacatccagacccatatgacaaacaataaaggcagtgctgcctggatggcgcctgaagtgttcgaggggagcaactattctgaaaagtgtgatgtgttttcctggggaattatcttatgggaggtcattactagaaggaaaccattcgacgagatcggtggccccgcctttcggataatgtgggcagttcacaatgggacccgccctccactgattaagaaccttccgaagcccatcgaatcattgatgacaagatgctggagcaaagatcctagtcagaggccatctatggaggaaattgtgaagatcatgacccacctgatgcggtacttccccggagctgacgagcctctacagtacccatgtcaatattccgatgaaggccagagcaattcggccacttctacaggttcctttatggacatcgcttcaaccaacacgagtaataaaagcgatactaacatggagcaggtacccgccaccaatgacacaattaagcgcctcgagtccaaactgcttaagaaccaggcaaaacaacagtctgaaagcgggcgactgtcattgggagccagtagaggctccagcgtggagtctctcccgcctacttcagaaggcaagaggatgagtgctgatatgagcgagatagaagcgcggatcgcagccaccacagcttactccaagcccaaacgtgggcatcgcaagaccgcctctttcggaaacattctggacgtcccagagatcgtgatatcgggtaatggccagcctagaaggcggagcattcaagacttaacggttactgggacagagcccggacaggtgtcctcacgaagttctagcccatccgtccgcatgatcaccacttcaggccccacaagcgaaaaacctaccagatctcacccatggacgccggatgactccaccgatacaaacggtagtgacaatagcatccccatggcatatctgactctcgatcatcagcttcagcctctggccccatgccccaactctaaggagtccatggctgtgtttgaacaacactgtaaaatggcccaggagtacatgaaggtacagaccgagattgcattgctactgcagaggaagcaagaactcgttgcggagctggaccaggatgaaaaagaccagcagaatacatcacggcttgtgcaagagcacaagaaactgttggatgaaaacaagagtctcagcacttattaccagcagtgcaaaaagcagctggaggtcatccgctcgcaacagcagaagagacaagggacctcctga

SEQ ID NO: 9394 - RNA, 1821 nt, synthetic construct
  misc_feature 1..1821: note = derived and/or modified sequence opt4 fromTAK1__Homo_sapiens__ABC40734
  source 1..1821: mol_type = other RNA
atgagcaccgccagcgccgccagcagcagcagcagcagcagcgccggcgagatgatcgaggcccccagccaggtgctgaacttcgaggagatcgactacaaggagatcgaggtggaggaggtggtgggcagaggcgccttcggcgtggtgtgcaaggccaagtggagagccaaggacgtggccatcaagcagatcgagagcgagagcgagagaaaggccttcatcgtggagctgagacagctgagcagagtgaaccaccccaacatcgtgaagctgtacggcgcctgcctgaaccccgtgtgcctggtgatggagtacgccgagggcggcagcctgtacaacgtgctgcacggcgccgagcccctgccctactacaccgccgcccacgccatgagctggtgcctgcagtgcagccagggcgtggcctacctgcacagcatgcagcccaaggccctgatccacagagacctgaagccccccaacctgctgctggtggccggcggcaccgtgctgaagatctgcgacttcggcaccgcctgcgacatccagacccacatgaccaacaacaagggcagcgccgcctggatggcccccgaggtgttcgagggcagcaactacagcgagaagtgcgacgtgttcagctggggcatcatcctgtgggaggtgatcaccagaagaaagcccttcgacgagatcggcggccccgccttcagaatcatgtgggccgtgcacaacggcaccagaccccccctgatcaagaacctgcccaagcccatcgagagcctgatgaccagatgctggagcaaggaccccagccagagacccagcatggaggagatcgtgaagatcatgacccacctgatgagatacttccccggcgccgacgagcccctgcagtacccctgccagtacagcgacgagggccagagcaacagcgccaccagcaccggcagcttcatggacatcgccagcaccaacaccagcaacaagagcgacaccaacatggagcaggtgcccgccaccaacgacaccatcaagagactggagagcaagctgctgaagaaccaggccaagcagcagagcgagagcggcagactgagcctgggcgccagcagaggcagcagcgtggagagcctgccccccaccagcgagggcaagagaatgagcgccgacatgagcgagatcgaggccagaatcgccgccaccaccgcctacagcaagcccaagagaggccacagaaagaccgccagcttcggcaacatcctggacgtgcccgagatcgtgatcagcggcaacggccagcccagaagaagaagcatccaggacctgaccgtgaccggcaccgagcccggccaggtgagcagcagaagcagcagccccagcgtgagaatgatcaccaccagcggccccaccagcgagaagcccaccagaagccacccctggacccccgacgacagcaccgacaccaacggcagcgacaacagcatccccatggcctacctgaccctggaccaccagctgcagcccctggccccctgccccaacagcaaggagagcatggccgtgttcgagcagcactgcaagatggcccaggagtacatgaaggtgcagaccgagatcgccctgctgctgcagagaaagcaggagctggtggccgagctggaccaggacgagaaggaccagcagaacaccagcagactggtgcaggagcacaagaagctgctggacgagaacaagagcctgagcacctactaccagcagtgcaagaagcagctggaggtgatcagaagccagcagcagaagagacagggcaccagctga

SEQ ID NO: 9395 - RNA, 1821 nt, synthetic construct
  misc_feature 1..1821: note = derived and/or modified sequence opt5 fromTAK1__Homo_sapiens__ABC40734
  source 1..1821: mol_type = other RNA
atgagcaccgcctccgctgcctctagctcctctagctcctctgcgggcgagatgatcgaagctcccagccaggtgctgaacttcgaggaaattgactacaaggagatcgaagtcgaggaggttgtggggagaggagcctttggcgtggtctgcaaagccaagtggcgggctaaagatgtggccattaagcaaatcgaatccgagagcgaacgcaaggctttcattgttgagctcagacagctgtctcgggtgaatcaccctaacatcgtcaaactttatggggcctgtctgaatccggtgtgcctcgttatggagtacgcggaaggaggctccctgtataacgtgcttcatggggccgagcccctgccttactatacagctgcccacgctatgagctggtgtctccagtgctctcagggagtcgcctacctgcattccatgcaacccaaggcgctgatccaccgcgacctcaaacctcccaatctgcttctggtggccggcggcacggtgctcaagatttgtgattttgggaccgcttgcgacatccagacacatatgaccaacaataaaggaagcgccgcttggatggcccctgaagtcttcgagggctctaactattccgaaaagtgtgatgtttttagctgggggattatcctgtgggaggtgattacaagacggaaaccgttcgacgagatcggaggccccgcctttcgcattatgtgggctgtgcacaatgggaccagacctccccttatcaagaacctgcctaagcccatcgaatccctcatgacacggtgctggtctaaagatccgagccagcgcccttccatggaggaaattgtcaagatcatgacccacctgatgagatacttccccggagcggacgagcctctgcagtacccctgtcaatatagcgatgaaggccagtctaattccgccacgagcaccggctcttttatggacattgctagcacaaacacctccaataaatctgatacaaacatggaacaggtgcccgccaccaatgacacgatcaagcggctcgagagcaaactgcttaagaaccaggccaaacaacagtccgagagcgggcgcctgtctctcggagcttccagaggcagctctgttgagtccctgcctccgacaagcgaagggaagcggatgtccgccgatatgtctgagattgaagcgcgcatcgctgccaccacagcctacagcaagcccaaaagaggacatcggaagaccgcttccttcggcaacatccttgacgtgcctgagattgtcatctctgggaatggacagcccagacgccggagcattcaagacctgaccgtgacaggcacggagcctggccaggtttccagcagatcttccagcccctctgtgcgcatgatcaccacatccgggccgaccagcgaaaaacctacacggtctcacccctggacccctgatgacagcacggatacaaacggatccgacaatagcattcccatggcctatctcaccctggatcatcagctgcagcctctcgctccctgcccgaactctaaggagtccatggccgtctttgaacaacactgtaaaatggcgcaggagtacatgaaggtgcagaccgagatcgccctgcttctgcagagaaagcaagaactcgtcgctgagctggaccaggatgaaaaagaccagcagaatacaagccgccttgtgcaagagcacaagaaactgctcgatgaaaacaagtccctgtctacctattaccagcagtgcaaaaagcagctggaggttatccggagccaacagcagaagagacaaggcacatcctga

SEQ ID NO: 9396 - protein, 596 aa, synthetic construct
  REGION 1..596: note = TAK1__Homo_sapiens__P49116
MTSPSPRIQIISTDSAVASPQRIQIVTDQQTGQKIQIVTAVDASGSPKQQFILTSPDGAGTGKVILASPETSSAKQLIFTTSDNLVPGRIQIVTDSASVERLLGKTDVQRPQVVEYCVVCGDKASGRHYGAVSCEGCKGFFKRSVRKNLTYSCRSNQDCIINKHHRNRCQFCRLKKCLEMGMKMESVQSERKPFDVQREKPSNCAASTEKIYIRKDLRSPLIATPTFVADKDGARQTGLLDPGMLVNIQQPLIREDGTVLLATDSKAETSQGALGTLANVVTSLANLSESLNNGDTSEIQPEDQSASEITRAFDTLAKALNTTDSSSSPSLADGIDTSGGGSIHVISRDQSTPIIEVEGPLLSDTHVTFKLTMPSPMPEYLNVHYICESASRLLFLSMHWARSIPAFQALGQDCNTSLVRACWNELFTLGLAQCAQVMSLSTILAAIVNHLQNSIQEDKLSGDRIKQVMEHIWKLQEFCNSMAKLDIDGYEYAYLKAIVLFSPDHPGLTSTSQIEKFQEKAQMELQDYVQKTYSEDTYRLARILVRLPALRLMSSNITEELFFTGLIGNVSIDSIIPYILKMETAEYNGQITGASL

SEQ ID NO: 9397 - RNA, 1791 nt, synthetic construct
  misc_feature 1..1791: note = TAK1__Homo_sapiens__AAC50118
  source 1..1791: mol_type = other RNA
atgaccagcccctccccacgcatccagataatctccaccgactctgctgtagcctcacctcagcgcattcagattgtcacagaccagcagacaggacagaaaatccagatagtcaccgcagtggacgcctccggatcccccaaacagcagttcatcctgaccagcccagatggagctggaactgggaaggtgatcctggcttccccagagacatccagcgccaagcaactcatattcaccacctcagacaacctcgtccctggcaggatccagattgtcacggattctgcctctgtggagcgtttactggggaagacggacgtccagcggccccaggtggtagagtactgtgtggtctgtggcgacaaagcctccggccgtcactatggggctgtcagttgtgaaggttgcaaaggtttcttcaaaaggagtgtgaggaaaaatttgacctacagctgccggagcaaccaagactgcatcatcaataaacatcaccggaaccgctgtcagttttgccggctgaaaaaatgcttagagatgggcatgaaaatggaatctgtgcagagtgaacggaagcccttcgatgtgcaacgggagaaaccaagcaattgtgctgcttcaactgagaaaatctatatccggaaagacctgagaagtcccctgatagctactcccacgtttgtggcagacaaagatggagcaagacaaacaggtcttcttgatccagggatgcttgtgaacatccagcagcctttgatacgtgaggatggtacagttctcctggccacggattctaaggctgaaacaagccagggagctctgggcacactggcaaatgtagtgacctcccttgccaacctaagtgaatctttgaacaacggtgacacttcagaaatccagccagaggaccagtctgcaagtgagataactcgggcatttgataccttagctaaagcacttaataccacagacagctcctcttctccaagcttggcagatgggatagacaccagtggaggagggagcatccacgtcatcagcagagaccagtcgacacccatcattgaggttgaaggccccctcctttcagacacacacgtcacatttaagctaacaatgcccagtccaatgccagagtacctcaacgtgcactacatctgtgagtctgcatcccgtctgcttttcctctcaatgcactgggctcggtcaatcccagcctttcaggcacttgggcaggactgcaacaccagccttgtgcgggcctgctggaatgagctcttcaccctcggcctggcccagtgtgcccaggtcatgagtctctccaccatcctggctgccattgtcaaccacctgcagaacagcatccaggaagataaactttctggtgaccggataaagcaagtcatggagcacatctggaagctgcaggagttctgtaacagcatggcgaagctggatatagatggctatgagtatgcataccttaaagctatagttctctttagccccgatcatccaggtttgaccagcacaagccagattgaaaaattccaagaaaaggcacagatggagttgcaggactatgttcagaaaacctactcagaagacacctaccgattggcccggatcctcgttcgcctgccggcactcaggctgatgagctccaacataacagaagaacttttttttactggtctcattggcaatgtttcgatagacagcataatcccctacatcctcaagatggagacagcagagtataatggccagatcaccggagccagtctatag

SEQ ID NO: 9398 - RNA, 1791 nt, synthetic construct
  misc_feature 1..1791: note = derived and/or modified sequence opt1 fromTAK1__Homo_sapiens__AAC50118
  source 1..1791: mol_type = other RNA
atgaccagcccctccccgcgcatccagatcatcagcaccgactccgccgtggccagcccccagcggatccagatcgtcacggaccagcagaccggccagaagatccagatcgtgaccgcggtggacgcctccgggagccccaagcagcagttcatcctgacctcccccgacggcgccgggacgggcaaggtcatcctcgccagcccggagacctccagcgccaagcagctgatcttcaccacctccgacaacctggtgcccgggcgcatccagatcgtgacggacagcgcgtccgtcgagcggctcctgggcaagaccgacgtgcagcgcccccaggtggtcgagtactgcgtggtgtgcggcgacaaggccagcgggcggcactacggcgccgtctcctgcgaggggtgcaagggcttcttcaagcgcagcgtgcggaagaacctgacctactcctgccgcagcaaccaggactgcatcatcaacaagcaccaccggaaccgctgccagttctgccggctcaagaagtgcctggagatggggatgaagatggagtccgtgcagagcgagcgcaagcccttcgacgtccagcgggagaagccgagcaactgcgccgcgtccaccgagaagatctacatccgcaaggacctgcggagccccctcatcgccacgcccaccttcgtggccgacaaggacggcgcccgccagaccggcctgctggaccccgggatgctcgtgaacatccagcagccgctgatccgggaggacggcaccgtcctgctcgccacggactccaaggcggagaccagccagggggccctgggcaccctggccaacgtggtgacctccctcgccaacctgagcgagtccctgaacaacggcgacacgagcgagatccagcccgaggaccagtccgccagcgagatcacccgcgcgttcgacaccctcgccaaggccctgaacaccacggactccagctccagcccctccctggccgacgggatcgacaccagcggcgggggctccatccacgtcatcagccgggaccagtccacccccatcatcgaggtggaggggccgctcctgagcgacacccacgtgacgttcaagctgaccatgcccagccccatgcccgagtacctcaacgtccactacatctgcgagtccgccagccgcctgctgttcctctccatgcactgggcgcggagcatcccggccttccaggccctgggccaggactgcaacacctccctggtgcgcgcctgctggaacgagctgttcaccctgggcctggcccagtgcgcgcaggtcatgagcctctccacgatcctggccgccatcgtgaaccacctccagaacagcatccaggaggacaagctctccggggaccgcatcaagcaggtcatggagcacatctggaagctgcaggagttctgcaacagcatggccaagctggacatcgacggctacgagtacgcgtacctcaaggccatcgtgctgttctcccccgaccaccccgggctgaccagcacctcccagatcgagaagttccaggagaaggcccagatggagctccaggactacgtgcagaagacctacagcgaggacacgtaccggctggcccgcatcctggtgcggctccccgccctgcgcctgatgtccagcaacatcaccgaggagctgttcttcaccggcctcatcgggaacgtctccatcgacagcatcatcccgtacatcctgaagatggagaccgcggagtacaacggccagatcaccggcgccagcctgtga

SEQ ID NO: 9399 - RNA, 1791 nt, synthetic construct
  misc_feature 1..1791: note = derived and/or modified sequence opt2 fromTAK1__Homo_sapiens__AAC50118
  source 1..1791: mol_type = other RNA
atgacctccccctccccccgcatccagatcatctccaccgactccgccgtcgcctccccccagcgcatccagatcgtcaccgaccagcagaccggccagaagatccagatcgtcaccgccgtcgacgcctccggctcccccaagcagcagttcatcctcacctcccccgacggcgccggcaccggcaaggtcatcctcgcctcccccgagacctcctccgccaagcagctcatcttcaccacctccgacaacctcgtccccggccgcatccagatcgtcaccgactccgcctccgtcgagcgcctcctcggcaagaccgacgtccagcgcccccaggtcgtcgagtactgcgtcgtctgcggcgacaaggcctccggccgccactacggcgccgtctcctgcgagggctgcaagggcttcttcaagcgctccgtccgcaagaacctcacctactcctgccgctccaaccaggactgcatcatcaacaagcaccaccgcaaccgctgccagttctgccgcctcaagaagtgcctcgagatgggcatgaagatggagtccgtccagtccgagcgcaagcccttcgacgtccagcgcgagaagccctccaactgcgccgcctccaccgagaagatctacatccgcaaggacctccgctcccccctcatcgccacccccaccttcgtcgccgacaaggacggcgcccgccagaccggcctcctcgaccccggcatgctcgtcaacatccagcagcccctcatccgcgaggacggcaccgtcctcctcgccaccgactccaaggccgagacctcccagggcgccctcggcaccctcgccaacgtcgtcacctccctcgccaacctctccgagtccctcaacaacggcgacacctccgagatccagcccgaggaccagtccgcctccgagatcacccgcgccttcgacaccctcgccaaggccctcaacaccaccgactcctcctcctccccctccctcgccgacggcatcgacacctccggcggcggctccatccacgtcatctcccgcgaccagtccacccccatcatcgaggtcgagggccccctcctctccgacacccacgtcaccttcaagctcaccatgccctcccccatgcccgagtacctcaacgtccactacatctgcgagtccgcctcccgcctcctcttcctctccatgcactgggcccgctccatccccgccttccaggccctcggccaggactgcaacacctccctcgtccgcgcctgctggaacgagctcttcaccctcggcctcgcccagtgcgcccaggtcatgtccctctccaccatcctcgccgccatcgtcaaccacctccagaactccatccaggaggacaagctctccggcgaccgcatcaagcaggtcatggagcacatctggaagctccaggagttctgcaactccatggccaagctcgacatcgacggctacgagtacgcctacctcaaggccatcgtcctcttctcccccgaccaccccggcctcacctccacctcccagatcgagaagttccaggagaaggcccagatggagctccaggactacgtccagaagacctactccgaggacacctaccgcctcgcccgcatcctcgtccgcctccccgccctccgcctcatgtcctccaacatcaccgaggagctcttcttcaccggcctcatcggcaacgtctccatcgactccatcatcccctacatcctcaagatggagaccgccgagtacaacggccagatcaccggcgcctccctctga

SEQ ID NO: 9400 - RNA, 1791 nt, synthetic construct
  misc_feature 1..1791: note = derived and/or modified sequence opt3 fromTAK1__Homo_sapiens__AAC50118
  source 1..1791: mol_type = other RNA
atgaccagcccctcccctagaatccagattatatctacagactcagccgtggctagtccacaaaggatccagattgtcactgatcagcagacgggccaaaagatccagattgttaccgcagtggacgccagcgggtccccgaaacagcagttcatcctgacatctcccgatggagcgggtactggcaaggtaatactcgcttcgcctgagacctcaagcgccaaacaacttatctttacaaccagtgacaacctggtgccagggcggattcagatcgtcactgattccgcatctgtggaacgcttgttaggaaagacagacgttcagcgaccccaggtggtcgagtactgcgtggtatgtggcgataaagccagcggtcgtcactatggggctgtttcctgcgaaggatgtaagggcttctttaagagatcagtgaggaaaaatctgacctacagttgccggagcaaccaagactgtattatcaataagcatcaccgcaacagatgccagttctgtaggcttaaaaagtgcctcgagatgggcatgaaaatggaatctgtccagtccgagcggaagccttttgatgtgcaacgcgagaagccatcaaattgtgcagccagcacggagaaaatatatattcgaaaggacctgagaagtccccttatcgctactcctaccttcgtggccgataaagacggggcgaggcagacaggactgttggatccaggtatgctcgtcaacattcagcagccgctgatccgggaagacggcactgttctgctcgcaaccgactctaaggccgaaacatcccaaggggctttaggaaccctggccaatgtggtaacgagccttgcaaacttgtcggagtctctgaataacggcgatacttccgagatccagcccgaagaccagtcagctagtgagattacacgtgcctttgataccctagcgaaagccctcaatactacagacagctcctctagcccttcactggcagatggtatagacaccagtgggggaggctccatccatgtgattagccgcgatcagtctacgccaatcatagaagtcgagggcccccttctgtcagacacccacgtgacattcaagttgactatgcctagtccaatgcccgaatacctcaacgttcattatatttgcgagagcgcttccagactgttatttctgtctatgcactgggccaggtcgatcccggctttccaagccctcgggcaggattgtaataccagccttgtgcgggcatgctggaacgagctgtttacattgggactagcccagtgcgctcaggtcatgtccctgtcaactatcctcgcggcaattgtgaatcatctgcaaaacagtatccaggaagacaaactttctggtgatcgaattaagcaggtaatggagcacatatggaagctgcaggagttctgtaacagcatggccaaattggacatcgacggctacgaatatgcttacctcaaggccattgttctgttttcccctgatcaccccgggttaacctcaacaagccaaatcgaaaaattccaggagaaggcacagatggagctgcaagactacgtgcagaaaacctattctgaagatacttaccgcctagccagaatcctcgtcaggctgccagctctacggttgatgtccagtaatattacggaggaactgttctttacaggactcataggcaacgtgagcatcgactctattatcccttatattctgaagatggagaccgccgaatacaatggtcagatcactggggcatccctttga

SEQ ID NO: 9401 - RNA, 1791 nt, synthetic construct
  misc_feature 1..1791: note = derived and/or modified sequence opt4 fromTAK1__Homo_sapiens__AAC50118
  source 1..1791: mol_type = other RNA
atgaccagccccagccccagaatccagatcatcagcaccgacagcgccgtggccagcccccagagaatccagatcgtgaccgaccagcagaccggccagaagatccagatcgtgaccgccgtggacgccagcggcagccccaagcagcagttcatcctgaccagccccgacggcgccggcaccggcaaggtgatcctggccagccccgagaccagcagcgccaagcagctgatcttcaccaccagcgacaacctggtgcccggcagaatccagatcgtgaccgacagcgccagcgtggagagactgctgggcaagaccgacgtgcagagaccccaggtggtggagtactgcgtggtgtgcggcgacaaggccagcggcagacactacggcgccgtgagctgcgagggctgcaagggcttcttcaagagaagcgtgagaaagaacctgacctacagctgcagaagcaaccaggactgcatcatcaacaagcaccacagaaacagatgccagttctgcagactgaagaagtgcctggagatgggcatgaagatggagagcgtgcagagcgagagaaagcccttcgacgtgcagagagagaagcccagcaactgcgccgccagcaccgagaagatctacatcagaaaggacctgagaagccccctgatcgccacccccaccttcgtggccgacaaggacggcgccagacagaccggcctgctggaccccggcatgctggtgaacatccagcagcccctgatcagagaggacggcaccgtgctgctggccaccgacagcaaggccgagaccagccagggcgccctgggcaccctggccaacgtggtgaccagcctggccaacctgagcgagagcctgaacaacggcgacaccagcgagatccagcccgaggaccagagcgccagcgagatcaccagagccttcgacaccctggccaaggccctgaacaccaccgacagcagcagcagccccagcctggccgacggcatcgacaccagcggcggcggcagcatccacgtgatcagcagagaccagagcacccccatcatcgaggtggagggccccctgctgagcgacacccacgtgaccttcaagctgaccatgcccagccccatgcccgagtacctgaacgtgcactacatctgcgagagcgccagcagactgctgttcctgagcatgcactgggccagaagcatccccgccttccaggccctgggccaggactgcaacaccagcctggtgagagcctgctggaacgagctgttcaccctgggcctggcccagtgcgcccaggtgatgagcctgagcaccatcctggccgccatcgtgaaccacctgcagaacagcatccaggaggacaagctgagcggcgacagaatcaagcaggtgatggagcacatctggaagctgcaggagttctgcaacagcatggccaagctggacatcgacggctacgagtacgcctacctgaaggccatcgtgctgttcagccccgaccaccccggcctgaccagcaccagccagatcgagaagttccaggagaaggcccagatggagctgcaggactacgtgcagaagacctacagcgaggacacctacagactggccagaatcctggtgagactgcccgccctgagactgatgagcagcaacatcaccgaggagctgttcttcaccggcctgatcggcaacgtgagcatcgacagcatcatcccctacatcctgaagatggagaccgccgagtacaacggccagatcaccggcgccagcctgtga

SEQ ID NO: 9402 - RNA, 1791 nt, synthetic construct
  misc_feature 1..1791: note = derived and/or modified sequence opt5 fromTAK1__Homo_sapiens__AAC50118
  source 1..1791: mol_type = other RNA
atgaccagcccctcccctagaatccagattatctctacagacagcgccgtggcttccccgcaacggattcagatcgtcacggatcagcagaccggccaaaagattcagatcgttacagccgtggacgcgtctgggagccccaaacagcagttcatcctgacctcccctgatggagctggcacagggaaggtgattctcgcctctcccgagaccagctccgccaaacaactgatctttacaaccagcgacaaccttgtccctggacgcattcagatcgtgacggattctgcttccgttgaaagactgctcggcaagaccgacgtgcagcggccccaggtcgtggagtactgcgttgtgtgtggggataaagccagcggacgccactatggcgctgtctcttgcgaaggctgtaaggggttctttaagagatccgtgcggaaaaatctgacatacagctgccgctctaaccaagactgtattatcaataagcatcacagaaaccggtgccagttctgtcgccttaaaaagtgcctggagatgggaatgaaaatggaatccgtgcagagcgagagaaagccttttgatgtccaacgggagaagccgtccaattgtgccgcgtctaccgaaaagatttatatccgcaaggacctcagaagccccctgatcgccacacctaccttcgttgctgataaagacggcgcccggcagacggggctgctcgatcccggaatgctggtgaacattcagcagcctcttatccgcgaggacggcacagtgctgctcgctaccgactccaaggccgaaacaagccaaggggcgctgggaacccttgccaatgtcgtgacctctctggctaacctctccgagagcctgaataacggcgatacatctgagattcagcccgaagaccagagcgcctccgagatcacgagagcttttgataccctggccaaagccctcaatacaaccgactctagctccagcccgtctctggctgatggcattgacacatccgggggaggcagcatccatgttatctctcgggatcagtccacccctattatcgaagtggaggggccccttctgagcgacacgcacgtcacattcaagctcaccatgccttcccccatgcccgaatacctgaacgtgcattatatttgcgagtctgcgagcagacttctgtttctctccatgcactgggcccgctctatccctgctttccaagccctgggacaggattgtaataccagcctggttcgggcctgctggaacgagctctttacactgggccttgctcagtgcgcccaggtgatgtccctgagcaccattctcgcggctatcgtcaatcatctgcaaaactctatccaggaagacaaactttccggggatagaattaaacaggtgatggagcacatctggaagctgcaggagttctgtaacagcatggccaaactcgacattgacggatacgaatatgcctacctgaaggctatcgtcctgttttctccggatcaccccggcctcacatccacgagccaaattgaaaaattccaggagaaggcccagatggagctgcaagactacgtgcagaaaacctattctgaagatacataccgccttgctcggatcctggttagactccctgccctgcgcctgatgagctccaatattaccgaggaacttttctttacaggcctcatcgggaacgtgagcatcgactctattatcccctatattctgaagatggagaccgcggaatacaatggacagatcacgggcgcctccctgtga

SEQ ID NO: 9403 - protein, 729 aa, synthetic construct
  REGION 1..729: note = TBK1__Homo_sapiens__Q9UHD2
MQSTSNHLWLLSDILGQGATANVFRGRHKKTGDLFAIKVFNNISFLRPVDVQMREFEVLKKLNHKNIVKLFAIEEETTTRHKVLIMEFCPCGSLYTVLEEPSNAYGLPESEFLIVLRDVVGGMNHLRENGIVHRDIKPGNIMRVIGEDGQSVYKLTDFGAARELEDDEQFVSLYGTEEYLHPDMYERAVLRKDHQKKYGATVDLWSIGVTFYHAATGSLPFRPFEGPRRNKEVMYKIITGKPSGAISGVQKAENGPIDWSGDMPVSCSLSRGLQVLLTPVLANILEADQEKCWGFDQFFAETSDILHRMVIHVFSLQQMTAHKIYIHSYNTATIFHELVYKQTKIISSNQELIYEGRRLVLEPGRLAQHFPKTTEENPIFVVSREPLNTIGLIYEKISLPKVHPRYDLDGDASMAKAITGVVCYACRIASTLLLYQELMRKGIRWLIELIKDDYNETVHKKTEVVITLDFCIRNIEKTVKVYEKLMKINLEAAELGEISDIHTKLLRLSSSQGTIETSLQDIDSRLSPGGSLADAWAHQEGTHPKDRNVEKLQVLLNCMTEIYYQFKKDKAERRLAYNEEQIHKFDKQKLYYHATKAMTHFTDECVKKYEAFLNKSEEWIRKMLHLRKQLLSLTNQCFDIEEEVSKYQEYTNELQETLPQKMFTASSGIKHTMTPIYPSSNTLVEMTLGMKKLKEEMEGVVKELAENNHILERFGSLTMDGGLRNVDCL

SEQ ID NO: 9404 - RNA, 2190 nt, synthetic construct
  misc_feature 1..2190: note = TBK1__Homo_sapiens__AAF05989
  source 1..2190: mol_type = other RNA
atgcagagcacttctaatcatctgtggcttttatctgatattttaggccaaggagctactgcaaatgtctttcgtggaagacataagaaaactggtgatttatttgctatcaaagtatttaataacataagcttccttcgtccagtggatgttcaaatgagagaatttgaagtgttgaaaaaactcaatcacaaaaatattgtcaaattatttgctattgaagaggagacaacaacaagacataaagtacttattatggaattttgtccatgtgggagtttatacactgttttagaagaaccttctaatgcctatggactaccagaatctgaattcttaattgttttgcgagatgtggtgggtggaatgaatcatctacgagagaatggtatagtgcaccgtgatatcaagccaggaaatatcatgcgtgttataggggaagatggacagtctgtgtacaaactcacagattttggtgcagctagagaattagaagatgatgagcagtttgtttctctgtatggcacagaagaatatttgcaccctgatatgtatgagagagcagtgctaagaaaagatcatcagaagaaatatggagcaacagttgatctttggagcattggggtaacattttaccatgcagctactggatcactgccatttagaccctttgaagggcctcgtaggaataaagaagtgatgtataaaataattacaggaaagccttctggtgcaatatctggagtacagaaagcagaaaatggaccaattgactggagtggagacatgcctgtttcttgcagtctttctcggggtcttcaggttctacttacccctgttcttgcaaacatccttgaagcagatcaggaaaagtgttggggttttgaccagttttttgcagaaactagtgatatacttcaccgaatggtaattcatgttttttcgctacaacaaatgacagctcataagatttatattcatagctataatactgctactatatttcatgaactggtatataaacaaaccaaaattatttcttcaaatcaagaacttatctacgaagggcgacgcttagtcttagaacctggaaggctggcacaacatttccctaaaactactgaggaaaaccctatatttgtagtaagccgggaacctctgaataccataggattaatatatgaaaaaatttccctccctaaagtacatccacgttatgatttagacggggatgctagcatggctaaggcaataacaggggttgtgtgttatgcctgcagaattgccagtaccttactgctttatcaggaattaatgcgaaaggggatacgatggctgattgaattaattaaagatgattacaatgaaactgttcacaaaaagacagaagttgtgatcacattggatttctgtatcagaaacattgaaaaaactgtgaaagtatatgaaaagttgatgaagatcaacctggaagcggcagagttaggtgaaatttcagacatacacaccaaattgttgagactttccagttctcagggaacaatagaaaccagtcttcaggatatcgacagcagattatctccaggtggatcactggcagacgcatgggcacatcaagaaggcactcatccgaaagacagaaatgtagaaaaactacaagtcctgttaaattgcatgacagagatttactatcagttcaaaaaagacaaagcagaacgtagattagcttataatgaagaacaaatccacaaatttgataagcaaaaactgtattaccatgccacaaaagctatgacgcactttacagatgaatgtgttaaaaagtatgaggcatttttgaataagtcagaagaatggataagaaagatgcttcatcttaggaaacagttattatcgctgactaatcagtgttttgatattgaagaagaagtatcaaaatatcaagaatatactaatgagttacaagaaactctgcctcagaaaatgtttacagcttccagtggaatcaaacataccatgaccccaatttatccaagttctaacacattagtagaaatgactcttggtatgaagaaattaaaggaagagatggaaggggtggttaaagaacttgctgaaaataaccacattttagaaaggtttggctctttaaccatggatggtggccttcgcaacgttgactgtctttag

SEQ ID NO: 9405 - RNA, 2190 nt, synthetic construct
  misc_feature 1..2190: note = derived and/or modified sequence opt1 fromTBK1__Homo_sapiens__AAF05989
  source 1..2190: mol_type = other RNA
atgcagagcacctccaaccacctgtggctcctgagcgacatcctgggccagggggccaccgccaacgtgttccgcggccggcacaagaagacgggggacctcttcgcgatcaaggtcttcaacaacatctccttcctgcgccccgtggacgtgcagatgcgggagttcgaggtcctgaagaagctcaaccacaagaacatcgtgaagctgttcgccatcgaggaggagaccaccacccgccacaaggtgctgatcatggagttctgcccgtgcggcagcctctacacggtcctggaggagccctccaacgcctacgggctgcccgagagcgagttcctcatcgtgctgcgggacgtggtcggcggcatgaaccacctccgcgagaacgggatcgtgcaccgggacatcaagcccggcaacatcatgcgcgtgatcggggaggacggccagtccgtctacaagctgaccgacttcggggccgcccgggagctggaggacgacgagcagttcgtgagcctgtacggcaccgaggagtacctccacccggacatgtacgagcgcgcggtgctgcggaaggaccaccagaagaagtacggcgccaccgtcgacctgtggtccatcggggtgacgttctaccacgccgccaccggcagcctccccttccgccccttcgaggggccccggcgcaacaaggaggtgatgtacaagatcatcaccggcaagccgtccggcgcgatcagcggggtccagaaggccgagaacggccccatcgactggtccggggacatgcccgtgagctgctccctgagccggggcctccaggtgctgctgacccccgtcctggccaacatcctcgaggccgaccaggagaagtgctgggggttcgaccagttcttcgccgagacgtccgacatcctgcaccgcatggtgatccacgtgttcagcctgcagcagatgaccgcgcacaagatctacatccactcctacaacaccgccaccatcttccacgagctcgtctacaagcagacgaagatcatcagcagcaaccaggagctgatctacgagggccggcgcctggtgctcgagccgggccggctggcccagcacttccccaagaccaccgaggagaaccccatcttcgtcgtgtcccgcgagcccctgaacaccatcgggctcatctacgagaagatcagcctgccgaaggtgcacccccggtacgacctggacggcgacgcctccatggccaaggcgatcacgggggtcgtgtgctacgcctgccgcatcgccagcaccctcctgctgtaccaggagctcatgcgcaagggcatccggtggctgatcgagctgatcaaggacgactacaacgagaccgtgcacaagaagaccgaggtcgtgatcacgctcgacttctgcatccgcaacatcgagaagaccgtgaaggtctacgagaagctgatgaagatcaacctggaggccgccgagctcggggagatctccgacatccacaccaagctgctgcggctgagctccagccagggcaccatcgagacgtccctccaggacatcgacagccgcctgtcccccggcgggagcctggcggacgcctgggcccaccaggagggcacccaccccaaggaccggaacgtggagaagctccaggtgctgctgaactgcatgaccgagatctactaccagttcaagaaggacaaggccgagcgccggctcgcctacaacgaggagcagatccacaagttcgacaagcagaagctgtactaccacgcgaccaaggccatgacgcacttcaccgacgagtgcgtcaagaagtacgaggccttcctgaacaagtccgaggagtggatccgcaagatgctccacctccggaagcagctgctgagcctgaccaaccagtgcttcgacatcgaggaggaggtgtccaagtaccaggagtacaccaacgagctgcaggagacgctcccgcagaagatgttcaccgccagctccgggatcaagcacaccatgacccccatctaccccagctccaacaccctggtggagatgacgctgggcatgaagaagctcaaggaggagatggagggggtcgtgaaggagctggcggagaacaaccacatcctggagcgcttcggcagcctcaccatggacggcgggctgcggaacgtggactgcctgtga

SEQ ID NO: 9406 - RNA, 2190 nt, synthetic construct
  misc_feature 1..2190: note = derived and/or modified sequence opt2 fromTBK1__Homo_sapiens__AAF05989
  source 1..2190: mol_type = other RNA
atgcagtccacctccaaccacctctggctcctctccgacatcctcggccagggcgccaccgccaacgtcttccgcggccgccacaagaagaccggcgacctcttcgccatcaaggtcttcaacaacatctccttcctccgccccgtcgacgtccagatgcgcgagttcgaggtcctcaagaagctcaaccacaagaacatcgtcaagctcttcgccatcgaggaggagaccaccacccgccacaaggtcctcatcatggagttctgcccctgcggctccctctacaccgtcctcgaggagccctccaacgcctacggcctccccgagtccgagttcctcatcgtcctccgcgacgtcgtcggcggcatgaaccacctccgcgagaacggcatcgtccaccgcgacatcaagcccggcaacatcatgcgcgtcatcggcgaggacggccagtccgtctacaagctcaccgacttcggcgccgcccgcgagctcgaggacgacgagcagttcgtctccctctacggcaccgaggagtacctccaccccgacatgtacgagcgcgccgtcctccgcaaggaccaccagaagaagtacggcgccaccgtcgacctctggtccatcggcgtcaccttctaccacgccgccaccggctccctccccttccgccccttcgagggcccccgccgcaacaaggaggtcatgtacaagatcatcaccggcaagccctccggcgccatctccggcgtccagaaggccgagaacggccccatcgactggtccggcgacatgcccgtctcctgctccctctcccgcggcctccaggtcctcctcacccccgtcctcgccaacatcctcgaggccgaccaggagaagtgctggggcttcgaccagttcttcgccgagacctccgacatcctccaccgcatggtcatccacgtcttctccctccagcagatgaccgcccacaagatctacatccactcctacaacaccgccaccatcttccacgagctcgtctacaagcagaccaagatcatctcctccaaccaggagctcatctacgagggccgccgcctcgtcctcgagcccggccgcctcgcccagcacttccccaagaccaccgaggagaaccccatcttcgtcgtctcccgcgagcccctcaacaccatcggcctcatctacgagaagatctccctccccaaggtccacccccgctacgacctcgacggcgacgcctccatggccaaggccatcaccggcgtcgtctgctacgcctgccgcatcgcctccaccctcctcctctaccaggagctcatgcgcaagggcatccgctggctcatcgagctcatcaaggacgactacaacgagaccgtccacaagaagaccgaggtcgtcatcaccctcgacttctgcatccgcaacatcgagaagaccgtcaaggtctacgagaagctcatgaagatcaacctcgaggccgccgagctcggcgagatctccgacatccacaccaagctcctccgcctctcctcctcccagggcaccatcgagacctccctccaggacatcgactcccgcctctcccccggcggctccctcgccgacgcctgggcccaccaggagggcacccaccccaaggaccgcaacgtcgagaagctccaggtcctcctcaactgcatgaccgagatctactaccagttcaagaaggacaaggccgagcgccgcctcgcctacaacgaggagcagatccacaagttcgacaagcagaagctctactaccacgccaccaaggccatgacccacttcaccgacgagtgcgtcaagaagtacgaggccttcctcaacaagtccgaggagtggatccgcaagatgctccacctccgcaagcagctcctctccctcaccaaccagtgcttcgacatcgaggaggaggtctccaagtaccaggagtacaccaacgagctccaggagaccctcccccagaagatgttcaccgcctcctccggcatcaagcacaccatgacccccatctacccctcctccaacaccctcgtcgagatgaccctcggcatgaagaagctcaaggaggagatggagggcgtcgtcaaggagctcgccgagaacaaccacatcctcgagcgcttcggctccctcaccatggacggcggcctccgcaacgtcgactgcctctga

SEQ ID NO: 9407 - RNA, 2190 nt, synthetic construct
  misc_feature 1..2190: note = derived and/or modified sequence opt3 fromTBK1__Homo_sapiens__AAF05989
  source 1..2190: mol_type = other RNA
atgcagagcacctccaaccacctgtggctcctttctgacatcctgggccaaggggccacagctaatgtgttcagaggaaggcataagaaaactggtgatttgtttgcaattaaggtcttcaacaatatatcatttttacggcccgttgacgtgcagatgcgcgagttcgaagtactgaaaaagctaaaccacaaaaatatcgtgaagctctttgccattgaggaagagacgaccacacgacataaggtcctgatcatggagttctgcccttgtggcagtctttacactgtgctggaggagccaagcaacgcgtatgggttgccggaatccgagtttctcattgttctgcgtgatgtggtcggaggcatgaatcacctgagagaaaacggtatcgtgcatagggacataaaacccgggaatatcatgcgggtaattggagaggatggccagtctgtttacaagctcaccgacttcggcgctgcccgcgagttagaagatgacgagcagtttgtgtcgctgtatgggacagaagagtaccttcaccctgatatgtatgaaagagcagtcttgaggaaagaccaccaaaagaaatacggagccaccgtggatctgtggtcaatcggtgtgactttctatcatgctgcaacaggcagcctaccatttcggcccttcgaggggcctcgccgaaacaaggaggtcatgtacaagattatcaccggaaaaccaagtggcgccatatccggtgttcagaaggctgaaaatgggcccattgactggtctggagatatgcctgtgagctgctccctctcaagaggcctgcaggtacttctgacgccagtgttggccaacatcctcgaggcggaccaggaaaaatgttggggctttgaccaattcttcgcagagaccagtgatattctgcacaggatggtcatccatgtgtttagcttacagcagatgactgcccacaagatctacattcactcttataatacagctactatattccatgaactggtttacaaacagaccaagatcatttcctcaaaccaagagctcatctatgaggggcggcgtcttgtgctggaaccgggacgcttggcccagcactttcccaaaacaaccgaggaaaatcctatattcgtcgtgagcagagagccactaaacacgattggtctgatctacgaaaagatcagtctccccaaggtacatcctaggtatgacctggatggcgacgcatctatggctaaagccattactggggttgtgtgctacgcgtgtcggatcgcctccacacttctgttgtatcaggagctcatgcgaaagggcattcgctggctgatagagttaatcaaagatgactacaacgaaaccgtccacaagaaaactgaggtggtcattacactggatttttgcatcagaaatatcgaaaagaccgtgaaggtttacgagaaactaatgaagattaacctcgaggcagctgaactgggagagataagcgacatccatacgaaacttttgaggctgtcgtcttcccaaggtaccattgaaacatcactccaggatatcgacagtcggctgagcccagggggctcccttgccgatgcttgggcccaccaggagggaactcaccccaaggaccgcaatgtggaaaaactgcaggtattgctcaactgtatgaccgagatttattaccaattcaagaaggacaaagcagagagaaggctggcctataatgaagaacagatccataagtttgataaacagaagttatactatcacgctacaaaagcgatgactcatttcaccgacgaatgcgtcaagaagtacgaggcatttctgaacaaatctgaagagtggatacgtaagatgctacacctccggaaacagctgcttagcttgacaaatcaatgtttcgatatcgaggaagaggtgtcaaagtatcaggaatacaccaacgagctgcaggaaactctcccgcagaaaatgtttacggccagttccggcattaagcacacaatgacccctatctaccccagctctaatactctggttgagatgaccttagggatgaaaaagctgaaggaggaaatggagggagtggtcaaagaacttgctgagaacaatcatattttggagcgattcggttcactcacaatggacggcgggctgagaaacgtggattgcctatga

SEQ ID NO: 9408 - RNA, 2190 nt, synthetic construct
  misc_feature 1..2190: note = derived and/or modified sequence opt4 fromTBK1__Homo_sapiens__AAF05989
  source 1..2190: mol_type = other RNA
atgcagagcaccagcaaccacctgtggctgctgagcgacatcctgggccagggcgccaccgccaacgtgttcagaggcagacacaagaagaccggcgacctgttcgccatcaaggtgttcaacaacatcagcttcctgagacccgtggacgtgcagatgagagagttcgaggtgctgaagaagctgaaccacaagaacatcgtgaagctgttcgccatcgaggaggagaccaccaccagacacaaggtgctgatcatggagttctgcccctgcggcagcctgtacaccgtgctggaggagcccagcaacgcctacggcctgcccgagagcgagttcctgatcgtgctgagagacgtggtgggcggcatgaaccacctgagagagaacggcatcgtgcacagagacatcaagcccggcaacatcatgagagtgatcggcgaggacggccagagcgtgtacaagctgaccgacttcggcgccgccagagagctggaggacgacgagcagttcgtgagcctgtacggcaccgaggagtacctgcaccccgacatgtacgagagagccgtgctgagaaaggaccaccagaagaagtacggcgccaccgtggacctgtggagcatcggcgtgaccttctaccacgccgccaccggcagcctgcccttcagacccttcgagggccccagaagaaacaaggaggtgatgtacaagatcatcaccggcaagcccagcggcgccatcagcggcgtgcagaaggccgagaacggccccatcgactggagcggcgacatgcccgtgagctgcagcctgagcagaggcctgcaggtgctgctgacccccgtgctggccaacatcctggaggccgaccaggagaagtgctggggcttcgaccagttcttcgccgagaccagcgacatcctgcacagaatggtgatccacgtgttcagcctgcagcagatgaccgcccacaagatctacatccacagctacaacaccgccaccatcttccacgagctggtgtacaagcagaccaagatcatcagcagcaaccaggagctgatctacgagggcagaagactggtgctggagcccggcagactggcccagcacttccccaagaccaccgaggagaaccccatcttcgtggtgagcagagagcccctgaacaccatcggcctgatctacgagaagatcagcctgcccaaggtgcaccccagatacgacctggacggcgacgccagcatggccaaggccatcaccggcgtggtgtgctacgcctgcagaatcgccagcaccctgctgctgtaccaggagctgatgagaaagggcatcagatggctgatcgagctgatcaaggacgactacaacgagaccgtgcacaagaagaccgaggtggtgatcaccctggacttctgcatcagaaacatcgagaagaccgtgaaggtgtacgagaagctgatgaagatcaacctggaggccgccgagctgggcgagatcagcgacatccacaccaagctgctgagactgagcagcagccagggcaccatcgagaccagcctgcaggacatcgacagcagactgagccccggcggcagcctggccgacgcctgggcccaccaggagggcacccaccccaaggacagaaacgtggagaagctgcaggtgctgctgaactgcatgaccgagatctactaccagttcaagaaggacaaggccgagagaagactggcctacaacgaggagcagatccacaagttcgacaagcagaagctgtactaccacgccaccaaggccatgacccacttcaccgacgagtgcgtgaagaagtacgaggccttcctgaacaagagcgaggagtggatcagaaagatgctgcacctgagaaagcagctgctgagcctgaccaaccagtgcttcgacatcgaggaggaggtgagcaagtaccaggagtacaccaacgagctgcaggagaccctgccccagaagatgttcaccgccagcagcggcatcaagcacaccatgacccccatctaccccagcagcaacaccctggtggagatgaccctgggcatgaagaagctgaaggaggagatggagggcgtggtgaaggagctggccgagaacaaccacatcctggagagattcggcagcctgaccatggacggcggcctgagaaacgtggactgcctgtga

SEQ ID NO: 9409 - RNA, 2190 nt, synthetic construct
  misc_feature 1..2190: note = derived and/or modified sequence opt5 fromTBK1__Homo_sapiens__AAF05989
  source 1..2190: mol_type = other RNA
atgcagagcacctccaaccacctgtggctcctgtctgacatccttggccaaggggccacagctaatgtgttcagaggacggcataagaaaacgggcgatctgtttgccattaaggtcttcaacaatatcagctttctccgccccgttgacgtgcagatgagagagttcgaagtgctgaaaaagctgaaccacaaaaatattgtcaagctgtttgcgatcgaggaagagaccacaacccggcataaggtgctcattatggagttctgcccttgtgggtccctgtacacagttctggaggagccgtctaacgcttatggactccccgaaagcgagtttctgatcgtgcttcgcgatgtcgtgggcgggatgaatcacctgagagaaaacggaatcgttcatcgggacattaaacctggcaatatcatgcgcgtgattggcgaggatgggcagtccgtctacaagctcaccgacttcggagccgccagagagctggaagatgacgagcagtttgtgtctctttatggcacagaagagtacctgcaccccgatatgtatgaacgggctgtgctccgcaaagaccaccaaaagaaatacggggccaccgtcgatctgtggagcatcggagttacgttctatcatgctgccaccggctccctgccttttagacccttcgaggggcctcggcgcaacaaggaggtgatgtacaagattatcacaggaaaaccgagcggcgcgatttctggcgtgcagaaggccgaaaatgggcccatcgactggtccggagatatgcctgtcagctgctctctctccagaggccttcaggtgcttctgacccccgttctcgctaacatcctggaggccgaccaggaaaaatgttgggggtttgaccaattcttcgctgagacaagcgatattcttcaccggatggtgatccatgtcttttctctgcagcagatgaccgcccacaagatttacatccactcctataatacggcgacaattttccatgaactcgtgtacaaacagaccaagatcatcagctccaaccaagagctgatttatgagggacgcagactggttctcgaacctggccggctggcccagcactttcccaaaacaaccgaggaaaatccgatcttcgtggtctctagagagcctcttaacaccattgggctgatctacgaaaagattagcctccccaaggtgcatcctcgctatgacctggatggagacgcttccatggccaaagctatcacaggcgtcgtgtgctacgcctgtcggatcgccagcacgcttctgctctatcaggagctgatgagaaagggcattcgctggctgatcgagctcattaaagatgactacaacgaaaccgttcacaagaaaacagaggtggtcatcaccctggatttttgcattcggaatatcgaaaagacagtgaaggtttacgagaaacttatgaagattaacctggaggctgcggaactcggggagatctctgacatccataccaaactgctgagactttccagctctcaaggaacgattgaaacaagcctccaggatatcgactcccgcctgtctcccggcgggagcctggccgatgcttgggcccaccaggagggaacccaccccaaggaccggaatgtggaaaaactccaggtcctgcttaactgtatgaccgagatttattaccaattcaagaaggacaaagccgagagacgcctggcttataatgaagaacagatccataagtttgataaacagaagctctactatcacgccacaaaagcgatgacccatttcacagacgaatgcgtgaagaagtacgaggcttttctgaacaaatccgaagagtggattcggaagatgctgcaccttagaaaacagctcctgagcctgacgaatcaatgtttcgatatcgaggaagaggtgtctaagtatcaggaatacaccaacgagctccaggaaacactgcctcagaaaatgtttaccgcctccagcggcatcaagcacacaatgaccccgatttacccctcttccaatacgcttgttgagatgaccctggggatgaaaaagctcaaggaggaaatggagggcgtcgtgaaagaactggccgagaacaatcatatcctggagcgcttcggaagccttacaatggacggcgggctccggaacgtggattgcctgtga

SEQ ID NO: 9410 - protein, 712 aa, synthetic construct
  REGION 1..712: note = TICAM1__Homo_sapiens__Q8IUC6
MACTGPSLPSAFDILGAAGQDKLLYLKHKLKTPRPGCQGQDLLHAMVLLKLGQETEARISLEALKADAVARLVARQWAGVDSTEDPEEPPDVSWAVARLYHLLAEEKLCPASLRDVAYQEAVRTLSSRDDHRLGELQDEARNRCGWDIAGDPGSIRTLQSNLGCLPPSSALPSGTRSLPRPIDGVSDWSQGCSLRSTGSPASLASNLEISQSPTMPFLSLHRSPHGPSKLCDDPQASLVPEPVPGGCQEPEEMSWPPSGEIASPPELPSSPPPGLPEVAPDATSTGLPDTPAAPETSTNYPVECTEGSAGPQSLPLPILEPVKNPCSVKDQTPLQLSVEDTTSPNTKPCPPTPTTPETSPPPPPPPPSSTPCSAHLTPSSLFPSSLESSSEQKFYNFVILHARADEHIALRVREKLEALGVPDGATFCEDFQVPGRGELSCLQDAIDHSAFIILLLTSNFDCRLSLHQVNQAMMSNLTRQGSPDCVIPFLPLESSPAQLSSDTASLLSGLVRLDEHSQIFARKVANTFKPHRLQARKAMWRKEQDTRALREQSQHLDGERMQAAALNAAYSAYLQSYLSYQAQMEQLQVAFGSHMSFGTGAPYGARMPFGGQVPLGAPPPFPTWPGCPQPPPLHAWQAGTPPPPSPQPAAFPQSLPFPQSPAFPTASPAPPQSPGLQPLIIHHAQMVQLGLNNHMWNQRGSQAPEDKTQEAE

SEQ ID NO: 9411 - RNA, 2139 nt, synthetic construct
  misc_feature 1..2139: note = TICAM1__Homo_sapiens__AAI36557
  source 1..2139: mol_type = other RNA
atggcctgcacgggcccatcacttcctagcgccttcgacattctaggtgcagcaggccaggacaagctcttgtatctgaagcacaaactgaagaccccacgcccaggctgccaggggcaggacctcctgcatgccatggttctcctgaagctgggccaggaaactgaggccaggatctctctagaggcattgaaggccgatgcggtggcccggctggtggcccgccagtgggctggcgtggacagcaccgaggacccagaggagcccccagatgtgtcctgggctgtggcccgcttgtaccacctgctggctgaggagaagctgtgccccgcctcgctgcgggacgtggcctaccaggaagccgtccgcaccctcagctccagggacgaccaccggctgggggaacttcaggatgaggcccgaaaccggtgtgggtgggacattgctggggatccagggagcatccggacgctccagtccaatctgggctgcctcccaccatcctcggctttgccctctgggaccaggagcctcccacgccccattgacggtgtttcggactggagccaagggtgctccctgcgatccactggcagccctgcctccctggccagcaacttggaaatcagccagtcccctaccatgcccttcctcagcctgcaccgcagcccacatgggcccagcaagctctgtgacgacccccaggccagcttggtgcccgagcctgtccccggtggctgccaggagcctgaggagatgagctggccgccatcgggggagattgccagcccaccagagctgccaagcagcccacctcctgggcttcccgaagtggccccagatgcaacctccactggcctccctgatacccccgcagctccagaaaccagcaccaactacccagtggagtgcaccgaggggtctgcaggcccccagtctctccccttgcctattctggagccggtcaaaaacccctgctctgtcaaagaccagacgccactccaactttctgtagaagataccacctctccaaataccaagccgtgcccacctactcccaccaccccagaaacatcccctcctcctcctcctcctcctccttcatctactccttgttcagctcacctgaccccctcctccctgttcccttcctccctggaatcatcatcggaacagaaattctataactttgtgatcctccacgccagggcagacgaacacatcgccctgcgggttcgggagaagctggaggcccttggcgtgcccgacggggccaccttctgcgaggatttccaggtgccggggcgcggggagctgagctgcctgcaggacgccatagaccactcagctttcatcatcctacttctcacctccaacttcgactgtcgcctgagcctgcaccaggtgaaccaagccatgatgagcaacctcacgcgacaggggtcgccagactgtgtcatccccttcctgcccctggagagctccccggcccagctcagctccgacacggccagcctgctctccgggctggtgcggctggacgaacactcccagatcttcgccaggaaggtggccaacaccttcaagccccacaggcttcaggcccgaaaggccatgtggaggaaggaacaggacacccgagccctgcgggaacagagccaacacctggatggtgagcggatgcaggcggcggcactgaacgcagcctactcagcctacctccagagctacttgtcctaccaggcacagatggagcagctccaggtggcttttgggagccacatgtcatttgggactggggcgccctatggggctcgaatgccctttgggggccaggtgcccctgggagccccgccaccctttcccacttggccggggtgcccgcagccgccacccctgcacgcatggcaggctggcacccccccaccgccctccccacagccagcagcctttccacagtcactgcccttcccgcagtccccagccttccctacggcctcacccgcaccccctcagagcccagggctgcaacccctcattatccaccacgcacagatggtacagctggggctgaacaaccacatgtggaaccagagagggtcccaggcgcccgaggacaagacgcaggaggcagaatga

SEQ ID NO: 9412 - RNA, 2139 nt, synthetic construct
  misc_feature 1..2139: note = derived and/or modified sequence opt1 fromTICAM1__Homo_sapiens__AAI36557
  source 1..2139: mol_type = other RNA
atggcctgcaccggccccagcctgccgtccgccttcgacatcctcggggcggccggccaggacaagctgctgtacctcaagcacaagctgaagacgccccgccccgggtgccagggccaggacctgctccacgccatggtgctgctgaagctcgggcaggagaccgaggcccggatcagcctggaggccctgaaggcggacgccgtcgcccgcctcgtggcccggcagtgggcgggcgtggactccaccgaggaccccgaggagccgcccgacgtcagctgggccgtggcccgcctgtaccacctcctcgccgaggagaagctgtgccccgcctccctgcgggacgtggcgtaccaggaggccgtccgcaccctcagctcccgggacgaccaccgcctgggcgagctgcaggacgaggcccggaaccgctgcgggtgggacatcgccggcgaccccgggagcatccggaccctccagtccaacctgggctgcctgccgcccagctccgccctccccagcgggacgcgctccctgccccggccgatcgacggcgtgagcgactggtcccagggctgcagcctgcgctccaccgggagccccgcgtccctcgccagcaacctggagatcagccagtcccccaccatgcccttcctgagcctccaccggtccccgcacggccccagcaagctgtgcgacgacccccaggcctccctggtgcccgagccggtccccgggggctgccaggagcccgaggagatgagctggcccccgtccggcgagatcgccagcccgcccgagctgccctccagcccgccgcccgggctgcccgaggtggcccccgacgcgacctccacgggcctgcccgacacccccgccgcccccgagaccagcaccaactaccccgtggagtgcacggaggggtccgccggcccccagagcctccccctgccgatcctggagcccgtcaagaacccctgctccgtgaaggaccagacgcccctccagctgagcgtggaggacaccacctccccgaacaccaagccctgcccgcccacccccaccacccccgagacgagcccgccgcccccgccgccgccgccctccagcaccccctgcagcgcccacctgaccccctccagcctcttcccctccagcctggagtccagctccgagcagaagttctacaacttcgtcatcctgcacgcgcgcgccgacgagcacatcgccctccgggtgcgcgagaagctggaggccctgggggtgcccgacggcgcgaccttctgcgaggacttccaggtccccggccgcggggagctcagctgcctgcaggacgccatcgaccactccgccttcatcatcctgctgctcacgagcaacttcgactgccggctgtccctgcaccaggtgaaccaggccatgatgagcaacctcacccggcagggctcccccgactgcgtgatccccttcctgcccctggagagctcccccgcccagctcagctccgacaccgcgagcctgctgagcgggctcgtccgcctggacgagcactcccagatcttcgcccgcaaggtggccaacaccttcaagccccaccggctgcaggcccgcaaggccatgtggcggaaggagcaggacacgcgcgcgctccgggagcagagccagcacctggacggcgagcgcatgcaggccgccgccctgaacgccgcgtactccgcctacctccagagctacctgtcctaccaggcccagatggagcagctccaggtggccttcgggagccacatgtccttcggcaccggcgcgccctacggggcccggatgcccttcggcgggcaggtccccctgggcgcgcccccgcccttccccacctggcccgggtgcccccagccgccgcccctgcacgcctggcaggccggcacgccgcccccgcccagcccccagcccgccgccttcccccagtccctgcccttcccccagagccccgccttccccaccgcctcccccgccccgccccagagccccggcctccagcccctgatcatccaccacgcgcagatggtgcagctggggctcaacaaccacatgtggaaccagcgcggctcccaggcccccgaggacaagacccaggaggccgagtga

SEQ ID NO: 9413 - RNA, 2139 nt, synthetic construct
  misc_feature 1..2139: note = derived and/or modified sequence opt2 fromTICAM1__Homo_sapiens__AAI36557
  source 1..2139: mol_type = other RNA
atggcctgcaccggcccctccctcccctccgccttcgacatcctcggcgccgccggccaggacaagctcctctacctcaagcacaagctcaagaccccccgccccggctgccagggccaggacctcctccacgccatggtcctcctcaagctcggccaggagaccgaggcccgcatctccctcgaggccctcaaggccgacgccgtcgcccgcctcgtcgcccgccagtgggccggcgtcgactccaccgaggaccccgaggagccccccgacgtctcctgggccgtcgcccgcctctaccacctcctcgccgaggagaagctctgccccgcctccctccgcgacgtcgcctaccaggaggccgtccgcaccctctcctcccgcgacgaccaccgcctcggcgagctccaggacgaggcccgcaaccgctgcggctgggacatcgccggcgaccccggctccatccgcaccctccagtccaacctcggctgcctccccccctcctccgccctcccctccggcacccgctccctcccccgccccatcgacggcgtctccgactggtcccagggctgctccctccgctccaccggctcccccgcctccctcgcctccaacctcgagatctcccagtcccccaccatgcccttcctctccctccaccgctccccccacggcccctccaagctctgcgacgacccccaggcctccctcgtccccgagcccgtccccggcggctgccaggagcccgaggagatgtcctggcccccctccggcgagatcgcctccccccccgagctcccctcctcccccccccccggcctccccgaggtcgcccccgacgccacctccaccggcctccccgacacccccgccgcccccgagacctccaccaactaccccgtcgagtgcaccgagggctccgccggcccccagtccctccccctccccatcctcgagcccgtcaagaacccctgctccgtcaaggaccagacccccctccagctctccgtcgaggacaccacctcccccaacaccaagccctgcccccccacccccaccacccccgagacctcccccccccccccccccccccccccctcctccaccccctgctccgcccacctcaccccctcctccctcttcccctcctccctcgagtcctcctccgagcagaagttctacaacttcgtcatcctccacgcccgcgccgacgagcacatcgccctccgcgtccgcgagaagctcgaggccctcggcgtccccgacggcgccaccttctgcgaggacttccaggtccccggccgcggcgagctctcctgcctccaggacgccatcgaccactccgccttcatcatcctcctcctcacctccaacttcgactgccgcctctccctccaccaggtcaaccaggccatgatgtccaacctcacccgccagggctcccccgactgcgtcatccccttcctccccctcgagtcctcccccgcccagctctcctccgacaccgcctccctcctctccggcctcgtccgcctcgacgagcactcccagatcttcgcccgcaaggtcgccaacaccttcaagccccaccgcctccaggcccgcaaggccatgtggcgcaaggagcaggacacccgcgccctccgcgagcagtcccagcacctcgacggcgagcgcatgcaggccgccgccctcaacgccgcctactccgcctacctccagtcctacctctcctaccaggcccagatggagcagctccaggtcgccttcggctcccacatgtccttcggcaccggcgccccctacggcgcccgcatgcccttcggcggccaggtccccctcggcgcccccccccccttccccacctggcccggctgcccccagcccccccccctccacgcctggcaggccggcacccccccccccccctccccccagcccgccgccttcccccagtccctccccttcccccagtcccccgccttccccaccgcctcccccgcccccccccagtcccccggcctccagcccctcatcatccaccacgcccagatggtccagctcggcctcaacaaccacatgtggaaccagcgcggctcccaggcccccgaggacaagacccaggaggccgagtga

SEQ ID NO: 9414 - RNA, 2139 nt, synthetic construct
  misc_feature 1..2139: note = derived and/or modified sequence opt3 fromTICAM1__Homo_sapiens__AAI36557
  source 1..2139: mol_type = other RNA
atggcctgcaccggccccagcctgccttccgctttcgacatcctcggggcagccggacaggataagctgctgtacttgaaacacaagttaaaaacaccaagaccgggttgtcaaggccaggacctgctacatgcgatggtgctcctgaaacttgggcaggagactgaagctaggatttctctggaggccttgaaggcagatgccgtcgctcggctcgttgcacgccagtgggccggagtggactcaacggaagatcccgaggaacctccagacgtaagttgggctgtggcccgactgtatcaccttctcgcggaggagaagttatgccccgcaagcctgcgtgatgtcgcctaccaagaagctgtgagaaccctttcctctagggacgatcatcggttgggcgagctgcaggacgaagcccgcaacagatgtggttgggatatagcaggggaccctggatcgatcaggacactacagtcaaatctcggctgcctgccacccagcagtgcccttccttccggcactcggtctctgccacgcccgattgatggggttagcgactggtcccagggatgttcattgcgaagtaccggtagccccgcttctctcgcgtccaacctggagatctcacaaagccctacaatgccatttttaagtctgcacagatctccccatggcccttccaagctctgcgacgatccacaggccagccttgtgcccgagccggtccctgggggatgtcaggaacccgaggaaatgtcgtggccaccttctggcgagattgcatcccctccagaactgccctcaagtcctccaccgggtttgcccgaggtggctcctgacgccaccagcactgggctaccagatacacccgctgcccctgagacctccacgaattatccagtagaatgcactgagggatctgcaggcccccagagcctgccgctccctatcctggaaccagttaaaaacccctgttcagtgaaggaccaaacccctcttcagctgagtgtcgaggatacaacttcccccaataccaaaccatgccctcccacaccaaccacgccggaaactagccctcccccaccccctccacccccttcttcaacaccgtgtagtgcccacttgaccccaagctccctcttcccctcttcgctggagagctcctcagagcagaagttttacaacttcgtgatattacacgctagggcggacgaacatatcgcactgcgggtgcgtgagaaactagaagccctcggcgtccctgatggggctactttttgcgaggacttccaagttccaggacgcggtgaactgagttgccttcaggatgccattgaccactctgcatttatcattttgctgctcacaagcaatttcgattgtagactgtcccttcatcaggtgaaccaggccatgatgtcaaatctgaccaggcaaggcagccccgactgcgtaatcccctttttgccgctcgagtcttcccccgctcagctgagtagcgacacggcctctttactgtccgggctagtgcggctcgatgagcactcacagatattcgcacgaaaggtcgcgaacacctttaagccacaccgcctgcaggctagaaaagccatgtggaggaaggaacaagacacacgggcacttcgcgagcagagtcagcatttggatggagaaagaatgcaggccgctgccctgaatgcagcttatagcgcctacctccaatcgtatctgtcctaccaggcgcagatggagcagttacaagtggccttcggctctcacatgagctttggtactggggctccttacggcgcaaggatgcccttcggaggccaggttccactgggggcccctcccccattcccgacctggcctggatgtccccagccaccccctcttcatgcttggcaagccggtacaccaccccctccgtcaccacagcccgcagcgtttcctcagagtttgcccttcccacagtcccctgcctttcccactgcttctccagcccctccgcaaagccccggcctccagccactgattatccaccatgcacagatggtgcagctagggctgaacaatcacatgtggaaccaacgtggatcccaggctcctgaggacaaaacccaggaagccgagtga

SEQ ID NO: 9415 - RNA, 2139 nt, synthetic construct
  misc_feature 1..2139: note = derived and/or modified sequence opt4 fromTICAM1__Homo_sapiens__AAI36557
  source 1..2139: mol_type = other RNA
atggcctgcaccggccccagcctgcccagcgccttcgacatcctgggcgccgccggccaggacaagctgctgtacctgaagcacaagctgaagacccccagacccggctgccagggccaggacctgctgcacgccatggtgctgctgaagctgggccaggagaccgaggccagaatcagcctggaggccctgaaggccgacgccgtggccagactggtggccagacagtgggccggcgtggacagcaccgaggaccccgaggagccccccgacgtgagctgggccgtggccagactgtaccacctgctggccgaggagaagctgtgccccgccagcctgagagacgtggcctaccaggaggccgtgagaaccctgagcagcagagacgaccacagactgggcgagctgcaggacgaggccagaaacagatgcggctgggacatcgccggcgaccccggcagcatcagaaccctgcagagcaacctgggctgcctgccccccagcagcgccctgcccagcggcaccagaagcctgcccagacccatcgacggcgtgagcgactggagccagggctgcagcctgagaagcaccggcagccccgccagcctggccagcaacctggagatcagccagagccccaccatgcccttcctgagcctgcacagaagcccccacggccccagcaagctgtgcgacgacccccaggccagcctggtgcccgagcccgtgcccggcggctgccaggagcccgaggagatgagctggccccccagcggcgagatcgccagcccccccgagctgcccagcagccccccccccggcctgcccgaggtggcccccgacgccaccagcaccggcctgcccgacacccccgccgcccccgagaccagcaccaactaccccgtggagtgcaccgagggcagcgccggcccccagagcctgcccctgcccatcctggagcccgtgaagaacccctgcagcgtgaaggaccagacccccctgcagctgagcgtggaggacaccaccagccccaacaccaagccctgcccccccacccccaccacccccgagaccagcccccccccccccccccccccccccagcagcaccccctgcagcgcccacctgacccccagcagcctgttccccagcagcctggagagcagcagcgagcagaagttctacaacttcgtgatcctgcacgccagagccgacgagcacatcgccctgagagtgagagagaagctggaggccctgggcgtgcccgacggcgccaccttctgcgaggacttccaggtgcccggcagaggcgagctgagctgcctgcaggacgccatcgaccacagcgccttcatcatcctgctgctgaccagcaacttcgactgcagactgagcctgcaccaggtgaaccaggccatgatgagcaacctgaccagacagggcagccccgactgcgtgatccccttcctgcccctggagagcagccccgcccagctgagcagcgacaccgccagcctgctgagcggcctggtgagactggacgagcacagccagatcttcgccagaaaggtggccaacaccttcaagccccacagactgcaggccagaaaggccatgtggagaaaggagcaggacaccagagccctgagagagcagagccagcacctggacggcgagagaatgcaggccgccgccctgaacgccgcctacagcgcctacctgcagagctacctgagctaccaggcccagatggagcagctgcaggtggccttcggcagccacatgagcttcggcaccggcgccccctacggcgccagaatgcccttcggcggccaggtgcccctgggcgcccccccccccttccccacctggcccggctgcccccagcccccccccctgcacgcctggcaggccggcaccccccccccccccagcccccagcccgccgccttcccccagagcctgcccttcccccagagccccgccttccccaccgccagccccgcccccccccagagccccggcctgcagcccctgatcatccaccacgcccagatggtgcagctgggcctgaacaaccacatgtggaaccagagaggcagccaggcccccgaggacaagacccaggaggccgagtga

SEQ ID NO: 9416 - RNA, 2139 nt, synthetic construct
  misc_feature 1..2139: note = derived and/or modified sequence opt5 fromTICAM1__Homo_sapiens__AAI36557
  source 1..2139: mol_type = other RNA
atggcctgcaccggccccagcctgccttccgctttcgacatcctcggggccgcgggacaggataagctgctttacctgaaacacaagctcaaaacaccgagacccggctgtcaagggcaggacctgcttcatgctatggtgctgctcaagctgggacaggagacggaagcccggatttctctggaggccctcaaagctgatgccgtcgctcgcctggttgccagacagtgggcgggcgtggacagcaccgaagatcctgaggaaccccctgacgtgtcctgggccgtcgctcggctttatcatctgctcgccgaggagaagctgtgccccgcttctcttcgcgatgtggcctaccaagaagcggttagaacactgagctcccgggacgatcaccgcctcggggagctgcaggacgaagccagaaaccggtgtggatgggatatcgctggcgaccctggctctattcgcaccctgcagagcaatctcgggtgcctgccgccctccagcgcccttccttctggaacaagatccctgccccggcctatcgatggcgtgagcgactggtctcaggggtgttccctccgcagcaccggatctcccgcttccctggccagcaaccttgagatttcccaatctccgacaatgccttttctgagcctccacagatccccgcatggccctagcaagctgtgcgacgatccccaggcctctctggtccccgagcctgtgcccgggggatgtcaggaacccgaggaaatgtcctggcctcccagcggcgagatcgcttctcctcccgaactcccgagctcccctccccctggcctgcccgaggttgcgcctgacgccacctctacggggcttcccgataccccggctgcccctgagacaagcaccaattatcccgtggaatgcacagagggatccgccggcccccagagcctgcctctcccgatcctggaacccgtcaaaaacccttgttctgtgaaggaccaaacgccccttcagctgtccgtggaggataccacaagccctaataccaaaccctgccctcccacaccgaccacccctgaaacatctccccctcccccgcctccccctccctccagcacgccctgttccgctcacctcaccccttctagcctgttcccgtcctctctggagagctccagcgagcagaagttttacaacttcgtcattctccacgcccgggcggacgaacatatcgctctgcgcgttagagagaaacttgaagccctgggggtgcccgatggagccacattttgcgaggacttccaagtgcctggcagaggggaactctcttgcctgcaggatgctattgaccactccgcctttatcattctgcttctcaccagcaatttcgattgtcggctgtctctgcatcaggtcaaccaggctatgatgtccaatctcacacgccaaggaagccccgactgcgtgatcccttttctgccccttgagtctagccctgcccagctgtccagcgacaccgcgtctctcctgtccggcctggttcggcttgatgagcacagccagattttcgccagaaaggtggctaacacgtttaagccgcaccgcctccaggcccggaaagctatgtggagaaaggaacaagacacacgcgccctgcgggagcagtcccagcatctggatggcgaaagaatgcaggcggccgctctcaatgccgcttattctgcctacctgcaaagctatctttcctaccaggcccagatggagcagctgcaagtcgctttcgggtctcacatgagctttggaaccggcgcgccctacggggcccgcatgcctttcggaggccaggtgcccctcggggctcctcccccgttccctacctggcccggctgtccccagcctccccctctgcatgcctggcaagccggaacaccgccccctccctcccctcagcccgctgcctttccgcagtctctgcctttcccccagagccctgcgtttcccaccgcttcccctgctcccccgcaaagccctggccttcagcccctcatcatccaccatgcccagatggttcagctggggctgaacaatcacatgtggaaccaacggggatctcaggcccccgaggacaaaacacaggaagccgagtga

SEQ ID NO: 9417 - protein, 235 aa, synthetic construct
  REGION 1..235: note = TICAM2__Homo_sapiens__Q86XR7
MGIGKSKINSCPLSLSWGKRHSVDTSPGYHESDSKKSEDLSLCNVAEHSNTTEGPTGKQEGAQSVEEMFEEEAEEEVFLKFVILHAEDDTDEALRVQNLLQDDFGIKPGIIFAEMPCGRQHLQNLDDAVNGSAWTILLLTENFLRDTWCNFQFYTSLMNSVNRQHKYNSVIPMRPLNNPLPRERTPFALQTINALEEESRGFPTQVERIFQESVYKTQQTIWKETRNMVQRQFIA

SEQ ID NO: 9418 - RNA, 708 nt, synthetic construct
  misc_feature 1..708: note = TICAM2__Homo_sapiens__AAI09266
  source 1..708: mol_type = other RNA
atgggtatcgggaagtctaaaataaattcctgccctctttctctctcttggggtaaaaggcacagtgtggatacaagtccaggatatcatgagtcagattccaagaagtctgaagatctatccttgtgtaatgttgctgagcacagcaatacaacagaggggccaacaggaaagcaggagggagctcagagcgtggaagagatgtttgaagaagaagctgaagaagaggtgttcctcaaatttgtgatattgcatgcagaagatgacacagatgaagccctcagagtccagaatctgctacaagatgactttggtatcaaacccggaataatctttgctgagatgccatgtggcagacagcatttacagaatttagatgatgctgtaaatgggtctgcatggacaatcttattactgactgaaaactttttaagagatacttggtgtaatttccagttctatacgtccctaatgaactccgttaacaggcagcataaatacaactctgttatacccatgcggcccctgaacaatccccttccccgagaaaggactccctttgccctccaaaccatcaatgccttagaggaagaaagtcgtggatttcctacacaagtagaaagaatttttcaggagtctgtgtataagacacaacaaactatatggaaagagacaagaaatatggtacaaagacaatttattgcctga

SEQ ID NO: 9419 - RNA, 708 nt, synthetic construct
  misc_feature 1..708: note = derived and/or modified sequence opt1 fromTICAM2__Homo_sapiens__AAI09266
  source 1..708: mol_type = other RNA
atgggcatcggcaagagcaagatcaactcctgccccctgagcctctcctgggggaagcgccacagcgtggacacctccccggggtaccacgagagcgactccaagaagtccgaggacctgagcctgtgcaacgtcgccgagcacagcaacaccacggagggccccaccgggaagcaggagggcgcccagtccgtggaggagatgttcgaggaggaggcggaggaggaggtgttcctcaagttcgtcatcctgcacgccgaggacgacaccgacgaggccctgcgggtgcagaacctcctgcaggacgacttcggcatcaagcccgggatcatcttcgccgagatgccctgcggccgccagcacctccagaacctggacgacgccgtgaacgggagcgcgtggaccatcctgctgctcacggagaacttcctgcgggacacctggtgcaacttccagttctacacctccctgatgaacagcgtcaaccgccagcacaagtacaactccgtgatcccgatgcggcccctcaacaaccccctgccccgcgagcggaccccgttcgccctgcagacgatcaacgccctcgaggaggagagccgcggcttccccacccaggtggagcggatcttccaggagtccgtctacaagacccagcagaccatctggaaggagacgcgcaacatggtgcagcggcagttcatcgcctga

SEQ ID NO: 9420 - RNA, 708 nt, synthetic construct
  misc_feature 1..708: note = derived and/or modified sequence opt2 fromTICAM2__Homo_sapiens__AAI09266
  source 1..708: mol_type = other RNA
atgggcatcggcaagtccaagatcaactcctgccccctctccctctcctggggcaagcgccactccgtcgacacctcccccggctaccacgagtccgactccaagaagtccgaggacctctccctctgcaacgtcgccgagcactccaacaccaccgagggccccaccggcaagcaggagggcgcccagtccgtcgaggagatgttcgaggaggaggccgaggaggaggtcttcctcaagttcgtcatcctccacgccgaggacgacaccgacgaggccctccgcgtccagaacctcctccaggacgacttcggcatcaagcccggcatcatcttcgccgagatgccctgcggccgccagcacctccagaacctcgacgacgccgtcaacggctccgcctggaccatcctcctcctcaccgagaacttcctccgcgacacctggtgcaacttccagttctacacctccctcatgaactccgtcaaccgccagcacaagtacaactccgtcatccccatgcgccccctcaacaaccccctcccccgcgagcgcacccccttcgccctccagaccatcaacgccctcgaggaggagtcccgcggcttccccacccaggtcgagcgcatcttccaggagtccgtctacaagacccagcagaccatctggaaggagacccgcaacatggtccagcgccagttcatcgcctga

SEQ ID NO: 9421 - RNA, 708 nt, synthetic construct
  misc_feature 1..708: note = derived and/or modified sequence opt3 fromTICAM2__Homo_sapiens__AAI09266
  source 1..708: mol_type = other RNA
atgggcatcggaaagagcaaaattaactcctgccccctgtctctctcatgggggaagagacacagtgtggacaccagccctggttaccatgagtccgattctaaaaagtcggaagacctttcactgtgtaatgtcgccgagcacagcaacacaactgaaggcccaacggggaaacaggagggagctcaaagtgttgaagagatgttcgaggaagaggcagaagaggaggtgtttttgaagttcgtaatattacatgccgaagatgacaccgatgaggcgctgagggtgcagaatctactccaggacgattttggcatcaagccgggtattatcttcgctgaaatgccctgcgggcggcagcatctgcaaaaccttgacgatgccgtcaatggatccgcatggacaattctgttgctcactgagaactttctgcgcgacacctggtgtaatttccagttttatacatctctgatgaacagcgtgaatcgacagcacaaatacaactccgttatccctatgcgtccactcaataaccccttacctagagaaaggaccccattcgccctgcagactataaatgctcttgaggaggaatcacggggctttcccacacaagtggagcgcatcttccaggaaagtgtctataagacccagcagacgatttggaaagagactagaaacatggtgcaaaggcagtttatcgcatga

SEQ ID NO: 9422 - RNA, 708 nt, synthetic construct
  misc_feature 1..708: note = derived and/or modified sequence opt4 fromTICAM2__Homo_sapiens__AAI09266
  source 1..708: mol_type = other RNA
atgggcatcggcaagagcaagatcaacagctgccccctgagcctgagctggggcaagagacacagcgtggacaccagccccggctaccacgagagcgacagcaagaagagcgaggacctgagcctgtgcaacgtggccgagcacagcaacaccaccgagggccccaccggcaagcaggagggcgcccagagcgtggaggagatgttcgaggaggaggccgaggaggaggtgttcctgaagttcgtgatcctgcacgccgaggacgacaccgacgaggccctgagagtgcagaacctgctgcaggacgacttcggcatcaagcccggcatcatcttcgccgagatgccctgcggcagacagcacctgcagaacctggacgacgccgtgaacggcagcgcctggaccatcctgctgctgaccgagaacttcctgagagacacctggtgcaacttccagttctacaccagcctgatgaacagcgtgaacagacagcacaagtacaacagcgtgatccccatgagacccctgaacaaccccctgcccagagagagaacccccttcgccctgcagaccatcaacgccctggaggaggagagcagaggcttccccacccaggtggagagaatcttccaggagagcgtgtacaagacccagcagaccatctggaaggagaccagaaacatggtgcagagacagttcatcgcctga

SEQ ID NO: 9423 - RNA, 708 nt, synthetic construct
  misc_feature 1..708: note = derived and/or modified sequence opt5 fromTICAM2__Homo_sapiens__AAI09266
  source 1..708: mol_type = other RNA
atgggcatcggaaagagcaaaattaactcctgccccctgtctctcagctgggggaagagacactccgtggacacctctcctggctaccatgagagcgattccaaaaagtctgaagacctgagcctttgtaatgtcgccgagcactccaacacaacggaagggccgaccggaaaacaggagggcgctcaaagcgttgaagagatgttcgaggaagaggccgaagaggaggtgtttctgaagttcgtgatcctccatgcggaagatgacacagatgaggctctgcgggtccagaatcttctgcaggacgattttgggattaagcccggaatcattttcgccgaaatgccttgcggccgccagcacctccaaaacctggacgatgccgtgaatggctctgcttggaccatcctgctcctgacagagaactttcttagagacacctggtgtaatttccagttttatacatccctgatgaacagcgttaatcggcagcataaatacaactctgtgatccccatgcgccctctcaataaccccctgcctagagaacggaccccgttcgcccttcagacgattaatgctctggaggaggaatcccgcgggtttcccacccaagtcgagagaatcttccaggaaagcgtgtataagacacagcagaccatttggaaagagacacggaacatggttcaacgccagtttatcgcctga

SEQ ID NO: 9424 - protein, 221 aa, synthetic construct
  REGION 1..221: note = TIRAP__Homo_sapiens__A0A024R3M4
MASSTSLPAPGSRPKKPLGKMADWFRQTLLKKPKKRPNSPESTSSDASQPTSQDSPLPPSLSSVTSPSLPPTHASDSGSSRWSKDYDVCVCHSEEDLVAAQDLVSYLEGSTASLRCFLQLRDATPGGAIVSELCQALSSSHCRVLLITPGFLQDPWCKYQMLQALTEAPGAEGCTIPLLSGLSRAAYPPELRFMYYVDGRGPDGGFRQVKEAVMRYLQTLS

SEQ ID NO: 9425 - RNA, 666 nt, synthetic construct
  misc_feature 1..666: note = TIRAP__Homo_sapiens__EAW67688
  source 1..666: mol_type = other RNA
atggcatcatcgacctccctcccagctcctggctctcggcctaagaagcctctaggcaagatggctgactggttcaggcagaccctgctgaagaagcccaagaagaggcccaactccccagaaagcacctccagcgatgcttcacagcctacctcacaggacagcccactacccccaagcctcagctcagtcacgtctcccagcctgccacccacacatgcgagtgacagtggcagtagtcgctggagcaaagactatgacgtctgcgtgtgccacagtgaggaagacctggtggccgcccaggacctggtctcctacttggaaggcagcactgccagcctgcgctgcttcctgcaactccgggatgcaaccccaggcggcgctatagtgtccgagctgtgccaggcactgagcagtagtcactgccgggtgctgctcatcacgccgggcttccttcaggacccctggtgcaagtaccagatgctgcaggccctgaccgaggctccaggggccgagggctgcaccatccccctgctgtcgggcctcagcagagctgcctacccacctgagctccgattcatgtactacgtcgatggcaggggccctgatggtggctttcgtcaagtcaaagaagctgtcatgcgttatctgcagacactcagttga

SEQ ID NO: 9426 - RNA, 666 nt, synthetic construct
  misc_feature 1..666: note = derived and/or modified sequence opt1 fromTIRAP__Homo_sapiens__EAW67688
  source 1..666: mol_type = other RNA
atggccagctccaccagcctgcccgccccgggctcccgccccaagaagcccctcgggaagatggcggactggttccggcagaccctgctgaagaagcccaagaagcgcccgaacagccccgagtccacgagctccgacgccagccagcccacctcccaggacagccccctcccgccctccctgagctccgtgaccagcccctccctgcccccgacccacgccagcgactccggcagctcccggtggagcaaggactacgacgtctgcgtgtgccacagcgaggaggacctcgtggccgcccaggacctggtctcctacctggaggggagcacggcgtccctccgctgcttcctgcagctgcgggacgccacccccggcggggccatcgtgagcgagctctgccaggccctgtccagctcccactgccgcgtgctgctcatcacccccggcttcctgcaggacccctggtgcaagtaccagatgctgcaggcgctcaccgaggccccgggcgccgaggggtgcacgatccccctgctgagcggcctctcccgggccgcctacccgcccgagctgcgcttcatgtactacgtcgacgggcggggccccgacgggggcttccgccaggtgaaggaggcggtgatgcggtacctgcagaccctcagctga

SEQ ID NO: 9427 - RNA, 666 nt, synthetic construct
  misc_feature 1..666: note = derived and/or modified sequence opt2 fromTIRAP__Homo_sapiens__EAW67688
  source 1..666: mol_type = other RNA
atggcctcctccacctccctccccgcccccggctcccgccccaagaagcccctcggcaagatggccgactggttccgccagaccctcctcaagaagcccaagaagcgccccaactcccccgagtccacctcctccgacgcctcccagcccacctcccaggactcccccctccccccctccctctcctccgtcacctccccctccctcccccccacccacgcctccgactccggctcctcccgctggtccaaggactacgacgtctgcgtctgccactccgaggaggacctcgtcgccgcccaggacctcgtctcctacctcgagggctccaccgcctccctccgctgcttcctccagctccgcgacgccacccccggcggcgccatcgtctccgagctctgccaggccctctcctcctcccactgccgcgtcctcctcatcacccccggcttcctccaggacccctggtgcaagtaccagatgctccaggccctcaccgaggcccccggcgccgagggctgcaccatccccctcctctccggcctctcccgcgccgcctacccccccgagctccgcttcatgtactacgtcgacggccgcggccccgacggcggcttccgccaggtcaaggaggccgtcatgcgctacctccagaccctctcctga

SEQ ID NO: 9428 - RNA, 666 nt, synthetic construct
  misc_feature 1..666: note = derived and/or modified sequence opt3 fromTIRAP__Homo_sapiens__EAW67688
  source 1..666: mol_type = other RNA
atggccagctccacctctctgcccgctcctggctcaagaccaaagaaaccgctcgggaagatggcagactggttcaggcagacacttctgaaaaagcccaaaaagcggcctaacagtccagagagcacttcctctgatgcctcgcaacccacgtcacaggacagccctttgccacccagtttatcctctgtgaccagcccttccctgccaccgacacacgcgtcagatagtggaagctctcgctggtccaaggactacgatgtctgcgtttgtcattcagaagaggacctagtggctgcccaggatctcgtaagctatctggaaggtagtactgcatctcttcgatgctttctgcagttgcgtgacgccacccccggcggggctatcgtgtccgagctctgtcaagcactgagctcgtctcactgcagagtcctgctcattacacctggattcttacaggatccatggtgtaaataccagatgctgcaggcccttaccgaagctcccggcgccgagggttgcactatacctttgctgtccgggctatcaagggcggcatatccacccgagctccggtttatgtactatgtggacggacgcggcccggatggcgggttcagacaagttaaggaagccgtgatgaggtacctgcagacacttagttga

SEQ ID NO: 9429 - RNA, 666 nt, synthetic construct
  misc_feature 1..666: note = derived and/or modified sequence opt4 fromTIRAP__Homo_sapiens__EAW67688
  source 1..666: mol_type = other RNA
atggccagcagcaccagcctgcccgcccccggcagcagacccaagaagcccctgggcaagatggccgactggttcagacagaccctgctgaagaagcccaagaagagacccaacagccccgagagcaccagcagcgacgccagccagcccaccagccaggacagccccctgccccccagcctgagcagcgtgaccagccccagcctgccccccacccacgccagcgacagcggcagcagcagatggagcaaggactacgacgtgtgcgtgtgccacagcgaggaggacctggtggccgcccaggacctggtgagctacctggagggcagcaccgccagcctgagatgcttcctgcagctgagagacgccacccccggcggcgccatcgtgagcgagctgtgccaggccctgagcagcagccactgcagagtgctgctgatcacccccggcttcctgcaggacccctggtgcaagtaccagatgctgcaggccctgaccgaggcccccggcgccgagggctgcaccatccccctgctgagcggcctgagcagagccgcctacccccccgagctgagattcatgtactacgtggacggcagaggccccgacggcggcttcagacaggtgaaggaggccgtgatgagatacctgcagaccctgagctga

SEQ ID NO: 9430 - RNA, 666 nt, synthetic construct
  misc_feature 1..666: note = derived and/or modified sequence opt5 fromTIRAP__Homo_sapiens__EAW67688
  source 1..666: mol_type = other RNA
atggccagctccacctctctgcccgctcctggcagcagaccgaagaaacccctcgggaagatggccgactggttccggcagacactgcttaaaaagcctaaaaagcgccccaactcccctgagtctacgagctccgatgcgtctcaacccaccagccaggactcccctctgccgcccagcctctcttccgtgacaagcccttctctgccccctacccacgcttccgatagcggatcttccagatggagcaaggactacgatgtctgcgtttgtcattccgaagaggaccttgtggccgcccaggatctggtgtcttatctcgaaggcagcacagcttccctgcggtgctttctgcagctccgcgacgccacccccgggggagctatcgtcagcgagctgtgtcaagccctttcttccagccactgcagagtgctgctcattacaccgggcttcctgcaggatccttggtgtaaataccagatgcttcaggcgctgaccgaagcccccggggctgagggatgcacgatccctctcctgtctggcctgagccgggccgcttatcctcccgagctccgctttatgtactatgttgacggcagagggcccgatggaggcttccggcaagtgaaggaagccgtcatgcgctacctgcagaccctttcctga

SEQ ID NO: 9431 - protein, 221 aa, synthetic construct; identical to SEQ ID NO: 9424
  REGION 1..221: note = TIRAP__Homo_sapiens__P58753

SEQ ID NO: 9432 - RNA, 666 nt, synthetic construct
  misc_feature 1..666: note = TIRAP__Homo_sapiens__AAL05036
  source 1..666: mol_type = other RNA
atggcatcatcgacctccctcccagctcctggctctcggcctaagaagcctctaggcaagatggctgactggttcaggcagaccctgctgaagaagcccaagaagaggcccaactccccagaaagcacctccagcgatgcttcacagcctacctcacaggacagcccactacccccaagcctcagctcagtcacgtctcccagcctgccacccacacatgcgagtgacagtggcagtagtcgctggagcaaagactatgacgtctgcgtgtgccacagtgaggaagacctggtggccgcccaggacctggtctcctacttggaaggcagcactgccagcctgcgctgcttcctgcaactccgggatgcaaccccaggcggcgctatagtgtccgagctgtgccaggcactgagcagtagtcactgccgggtgctgctcatcacgccgggcttccttcaggacccctggtgcaagtaccagatgctgcaggccctgaccgaggctccaggggccgagggctgcaccatccccctgctgtcgggcctcagcagagctgcttacccacctgagctccgattcatgtactacgtcgatggcaggggccctgatggtggctttcgtcaagtcaaagaagctgtcatgcgttatctgcagacactcagttga

SEQ ID NO: 9433 - RNA, 666 nt, synthetic construct; identical to SEQ ID NO: 9426
  misc_feature 1..666: note = derived and/or modified sequence opt1 fromTIRAP__Homo_sapiens__AAL05036
  source 1..666: mol_type = other RNA

SEQ ID NO: 9434 - RNA, 666 nt, synthetic construct; identical to SEQ ID NO: 9427
  misc_feature 1..666: note = derived and/or modified sequence opt2 fromTIRAP__Homo_sapiens__AAL05036
  source 1..666: mol_type = other RNA

SEQ ID NO: 9435 - RNA, 666 nt, synthetic construct; identical to SEQ ID NO: 9428
  misc_feature 1..666: note = derived and/or modified sequence opt3 fromTIRAP__Homo_sapiens__AAL05036
  source 1..666: mol_type = other RNA

SEQ ID NO: 9436 - RNA, 666 nt, synthetic construct; identical to SEQ ID NO: 9429
  misc_feature 1..666: note = derived and/or modified sequence opt4 fromTIRAP__Homo_sapiens__AAL05036
  source 1..666: mol_type = other RNA

SEQ ID NO: 9437 - RNA, 666 nt, synthetic construct; identical to SEQ ID NO: 9430
  misc_feature 1..666: note = derived and/or modified sequence opt5 fromTIRAP__Homo_sapiens__AAL05036
  source 1..666: mol_type = other RNA

SEQ ID NO: 9438 - protein, 811 aa, synthetic construct
  REGION 1..811: note = TLR10__Homo_sapiens__A0A024R9W4
MRLIRNIYIFCSIVMTAEGDAPELPEERELMTNCSNMSLRKVPADLTPATTTLDLSYNLLFQLQSSDFHSVSKLRVLILCHNRIQQLDLKTFEFNKELRYLDLSNNRLKSVTWYLLAGLRYLDLSFNDFDTMPICEEAGNMSHLEILGLSGAKIQKSDFQKIAHLHLNTVFLGFRTLPHYEEGSLPILNTTKLHIVLPMDTNFWVLLRDGIKTSKILEMTNIDGKSQFVSYEMQRNLSLENAKTSVLLLNKVDLLWDDLFLILQFVWHTSVEHFQIRNVTFGGKAYLDHNSFDYSNTVMRTIKLEHVHFRVFYIQQDKIYLLLTKMDIENLTISNAQMPHMLFPNYPTKFQYLNFANNILTDELFKRTIQLPHLKTLILNGNKLETLSLVSCFANNTPLEHLDLSQNLLQHKNDENCSWPETVVNMNLSYNKLSDSVFRCLPKSIQILDLNNNQIQTVPKETIHLMALRELNIAFNFLTDLPGCSHFSRLSVLNIEMNFILSPSLDFVQSCQEVKTLNAGRNPFRCTCELKNFIQLETYSEVMMVGWSDSYTCEYPLNLRGTRLKDVHLHELSCNTALLIVTIVVIMLVLGLAVAFCCLHFDLPWYLRMLGQCTQTWHRVRKTTQEQLKRNVRFHAFISYSEHDSLWVKNELIPNLEKEDGSILICLYESYFDPGKSISENIVSFIEKSYKSIFVLSPNFVQNEWCHYEFYFAHHNLFHENSDHIILILLEPIPFYCIPTRYHKLKALLEKKAYLEWPKDRRKCGLFWANLRAAINVNVLATREMYELQTFTELNEESRGSTISLMRTDCL

SEQ ID NO: 9439 - RNA, 2436 nt, synthetic construct
  misc_feature 1..2436: note = TLR10__Homo_sapiens__EAW92898
  source 1..2436: mol_type = other RNA
atgagactcatcagaaacatttacatattttgtagtattgttatgacagcagagggtgatgctccagagctgccagaagaaagggaactgatgaccaactgctccaacatgtctctaagaaaggttcccgcagacttgaccccagccacaacgacactggatttatcctataacctcctttttcaactccagagttcagattttcattctgtctccaaactgagagttttgattctatgccataacagaattcaacagctggatctcaaaacctttgaattcaacaaggagttaagatatttagatttgtctaataacagactgaagagtgtaacttggtatttactggcaggtctcaggtatttagatctttcttttaatgactttgacaccatgcctatctgtgaggaagctggcaacatgtcacacctggaaatcctaggtttgagtggggcaaaaatacaaaaatcagatttccagaaaattgctcatctgcatctaaatactgtcttcttaggattcagaactcttcctcattatgaagaaggtagcctgcccatcttaaacacaacaaaactgcacattgttttaccaatggacacaaatttctgggttcttttgcgtgatggaatcaagacttcaaaaatattagaaatgacaaatatagatggcaaaagccaatttgtaagttatgaaatgcaacgaaatcttagtttagaaaatgctaagacatcggttctattgcttaataaagttgatttactctgggacgaccttttccttatcttacaatttgtttggcatacatcagtggaacactttcagatccgaaatgtgacttttggtggtaaggcttatcttgaccacaattcatttgactactcaaatactgtaatgagaactataaaattggagcatgtacatttcagagtgttttacattcaacaggataaaatctatttgcttttgaccaaaatggacatagaaaacctgacaatatcaaatgcacaaatgccacacatgcttttcccgaattatcctacgaaattccaatatttaaattttgccaataatatcttaacagacgagttgtttaaaagaactatccaactgcctcacttgaaaactctcattttgaatggcaataaactggagacactttctttagtaagttgctttgctaacaacacacccttggaacacttggatctgagtcaaaatctattacaacataaaaatgatgaaaattgctcatggccagaaactgtggtcaatatgaatctgtcatacaataaattgtctgattctgtcttcaggtgcttgcccaaaagtattcaaatacttgacctaaataataaccaaatccaaactgtacctaaagagactattcatctgatggccttacgagaactaaatattgcatttaattttctaactgatctccctggatgcagtcatttcagtagactttcagttctgaacattgaaatgaacttcattctcagcccatctctggattttgttcagagctgccaggaagttaaaactctaaatgcgggaagaaatccattccggtgtacctgtgaattaaaaaatttcattcagcttgaaacatattcagaggtcatgatggttggatggtcagattcatacacctgtgaataccctttaaacctaaggggaactaggttaaaagacgttcatctccacgaattatcttgcaacacagctctgttgattgtcaccattgtggttattatgctagttctggggttggctgtggccttctgctgtctccactttgatctgccctggtatctcaggatgctaggtcaatgcacacaaacatggcacagggttaggaaaacaacccaagaacaactcaagagaaatgtccgattccacgcatttatttcatacagtgaacatgattctctgtgggtgaagaatgaattgatccccaatctagagaaggaagatggttctatcttgatttgcctttatgaaagctactttgaccctggcaaaagcattagtgaaaatattgtaagcttcattgagaaaagctataagtccatctttgttttgtctcccaactttgtccagaatgagtggtgccattatgaattctactttgcccaccacaatctcttccatgaaaattctgatcatataattcttatcttactggaacccattccattctattgcattcccaccaggtatcataaactgaaagctctcctggaaaaaaaagcatacttggaatggcccaaggataggcgtaaatgtgggcttttctgggcaaaccttcgagctgctattaatgttaatgtattagccaccagagaaatgtatgaactgcagacattcacagagttaaatgaagagtctcgaggttctacaatctctctgatgagaacagattgtctataa

SEQ ID NO: 9440 - RNA, 2436 nt, synthetic construct
  misc_feature 1..2436: note = derived and/or modified sequence opt1 fromTLR10__Homo_sapiens__EAW92898
  source 1..2436: mol_type = other RNA
atgcgcctgatccggaacatctacatcttctgcagcatcgtgatgaccgccgagggcgacgcccccgagctcccggaggagcgcgagctgatgaccaactgctccaacatgagcctgcggaaggtccccgcggacctcacgcccgccaccaccaccctggacctgtcctacaacctcctgttccagctgcagagctccgacttccacagcgtgtccaagctccgcgtgctgatcctgtgccacaaccggatccagcagctcgacctgaagacgttcgagttcaacaaggagctgcgctacctcgacctgagcaacaaccggctgaagtccgtcacctggtacctcctggccgggctgcgctacctcgacctgagcttcaacgacttcgacaccatgcccatctgcgaggaggccggcaacatgtcccacctggagatcctcgggctgagcggcgccaagatccagaagtccgacttccagaagatcgcgcacctccacctcaacaccgtgttcctggggttccggacgctgccgcactacgaggagggcagcctccccatcctgaacaccaccaagctgcacatcgtgctccccatggacaccaacttctgggtcctgctgcgcgacggcatcaagacgtccaagatcctcgagatgaccaacatcgacgggaagtcccagttcgtgagctacgagatgcagcggaacctgagcctggagaacgccaagacctccgtgctcctgctgaacaaggtcgacctcctgtgggacgacctgttcctcatcctgcagttcgtgtggcacaccagcgtggagcacttccagatccgcaacgtcacgttcggcgggaaggcctacctggaccacaacagcttcgactactccaacaccgtgatgcggaccatcaagctcgagcacgtgcacttccgcgtcttctacatccagcaggacaagatctacctgctgctgaccaagatggacatcgagaacctcacgatcagcaacgcccagatgccccacatgctgttcccgaactaccccaccaagttccagtacctgaacttcgcgaacaacatcctcaccgacgagctgttcaagcggaccatccagctgccccacctcaagacgctgatcctgaacggcaacaagctcgagaccctgtccctggtgagctgcttcgccaacaacacgcccctcgagcacctggacctgtcccagaacctcctgcagcacaagaacgacgagaactgcagctggccggagaccgtggtcaacatgaacctgtcctacaacaagctcagcgactccgtgttccgctgcctgcccaagagcatccagatcctggacctcaacaacaaccagatccagaccgtgcccaaggagaccatccacctgatggccctgcgggagctcaacatcgccttcaacttcctgaccgacctgcccgggtgctcccacttcagccgcctctccgtcctgaacatcgagatgaacttcatcctgagcccgtccctcgacttcgtgcagagctgccaggaggtgaagaccctgaacgccggccggaaccccttccgctgcacgtgcgagctgaagaacttcatccagctcgagacctactccgaggtcatgatggtgggctggagcgactcctacacgtgcgagtaccccctgaacctgcgggggacccgcctcaaggacgtccacctccacgagctgagctgcaacaccgcgctgctgatcgtgaccatcgtggtcatcatgctggtgctcggcctggccgtggccttctgctgcctgcacttcgacctcccctggtacctgcgcatgctggggcagtgcacccagacctggcaccgggtccgcaagaccacgcaggagcagctcaagcggaacgtgcgcttccacgccttcatcagctactccgagcacgacagcctgtgggtgaagaacgagctgatcccgaacctcgagaaggaggacggctccatcctgatctgcctgtacgagagctacttcgaccccggcaagtccatcagcgagaacatcgtctccttcatcgagaagtcctacaagagcatcttcgtgctcagccccaacttcgtgcagaacgagtggtgccactacgagttctacttcgcccaccacaacctgttccacgagaactccgaccacatcatcctgatcctcctggagcccatcccgttctactgcatccccacccggtaccacaagctgaaggcgctcctggagaagaaggcctacctggagtggcccaaggaccgccggaagtgcgggctgttctgggccaacctgcgcgccgccatcaacgtcaacgtgctggcgacccgggagatgtacgagctccagaccttcacggagctgaacgaggagagccgcggctccaccatcagcctgatgcggaccgactgcctctga

SEQ ID NO: 9441 - RNA, 2436 nt, synthetic construct
  misc_feature 1..2436: note = derived and/or modified sequence opt2 fromTLR10__Homo_sapiens__EAW92898
  source 1..2436: mol_type = other RNA
atgcgcctcatccgcaacatctacatcttctgctccatcgtcatgaccgccgagggcgacgcccccgagctccccgaggagcgcgagctcatgaccaactgctccaacatgtccctccgcaaggtccccgccgacctcacccccgccaccaccaccctcgacctctcctacaacctcctcttccagctccagtcctccgacttccactccgtctccaagctccgcgtcctcatcctctgccacaaccgcatccagcagctcgacctcaagaccttcgagttcaacaaggagctccgctacctcgacctctccaacaaccgcctcaagtccgtcacctggtacctcctcgccggcctccgctacctcgacctctccttcaacgacttcgacaccatgcccatctgcgaggaggccggcaacatgtcccacctcgagatcctcggcctctccggcgccaagatccagaagtccgacttccagaagatcgcccacctccacctcaacaccgtcttcctcggcttccgcaccctcccccactacgaggagggctccctccccatcctcaacaccaccaagctccacatcgtcctccccatggacaccaacttctgggtcctcctccgcgacggcatcaagacctccaagatcctcgagatgaccaacatcgacggcaagtcccagttcgtctcctacgagatgcagcgcaacctctccctcgagaacgccaagacctccgtcctcctcctcaacaaggtcgacctcctctgggacgacctcttcctcatcctccagttcgtctggcacacctccgtcgagcacttccagatccgcaacgtcaccttcggcggcaaggcctacctcgaccacaactccttcgactactccaacaccgtcatgcgcaccatcaagctcgagcacgtccacttccgcgtcttctacatccagcaggacaagatctacctcctcctcaccaagatggacatcgagaacctcaccatctccaacgcccagatgccccacatgctcttccccaactaccccaccaagttccagtacctcaacttcgccaacaacatcctcaccgacgagctcttcaagcgcaccatccagctcccccacctcaagaccctcatcctcaacggcaacaagctcgagaccctctccctcgtctcctgcttcgccaacaacacccccctcgagcacctcgacctctcccagaacctcctccagcacaagaacgacgagaactgctcctggcccgagaccgtcgtcaacatgaacctctcctacaacaagctctccgactccgtcttccgctgcctccccaagtccatccagatcctcgacctcaacaacaaccagatccagaccgtccccaaggagaccatccacctcatggccctccgcgagctcaacatcgccttcaacttcctcaccgacctccccggctgctcccacttctcccgcctctccgtcctcaacatcgagatgaacttcatcctctccccctccctcgacttcgtccagtcctgccaggaggtcaagaccctcaacgccggccgcaaccccttccgctgcacctgcgagctcaagaacttcatccagctcgagacctactccgaggtcatgatggtcggctggtccgactcctacacctgcgagtaccccctcaacctccgcggcacccgcctcaaggacgtccacctccacgagctctcctgcaacaccgccctcctcatcgtcaccatcgtcgtcatcatgctcgtcctcggcctcgccgtcgccttctgctgcctccacttcgacctcccctggtacctccgcatgctcggccagtgcacccagacctggcaccgcgtccgcaagaccacccaggagcagctcaagcgcaacgtccgcttccacgccttcatctcctactccgagcacgactccctctgggtcaagaacgagctcatccccaacctcgagaaggaggacggctccatcctcatctgcctctacgagtcctacttcgaccccggcaagtccatctccgagaacatcgtctccttcatcgagaagtcctacaagtccatcttcgtcctctcccccaacttcgtccagaacgagtggtgccactacgagttctacttcgcccaccacaacctcttccacgagaactccgaccacatcatcctcatcctcctcgagcccatccccttctactgcatccccacccgctaccacaagctcaaggccctcctcgagaagaaggcctacctcgagtggcccaaggaccgccgcaagtgcggcctcttctgggccaacctccgcgccgccatcaacgtcaacgtcctcgccacccgcgagatgtacgagctccagaccttcaccgagctcaacgaggagtcccgcggctccaccatctccctcatgcgcaccgactgcctctga

SEQ ID NO: 9442 - RNA, 2436 nt, synthetic construct
  misc_feature 1..2436: note = derived and/or modified sequence opt3 fromTLR10__Homo_sapiens__EAW92898
  source 1..2436: mol_type = other RNA
atgagactgatcaggaacatttacatattctgcagcatcgtgatgaccgccgagggcgacgctcccgaactccctgaggaacgggagcttatgacaaattgttccaacatgtctctgcgcaaggtcccagcagatttgactccggccacgaccacattagacctgtcatataatctactctttcagctgcaaagtagcgatttccactccgtttctaaacttcgagtgctgattttgtgccataaccgtatccagcagctcgacctgaagacttttgagttcaataaagaactgagatacctcgatttatcgaacaataggctgaagtcagtaacctggtatcttttggcggggctgcggtacctagacctcagctttaacgatttcgacacaatgcccatttgtgaggaagctggaaatatgagtcacctggagatccttggtctgtccggcgccaaaatacagaagtctgattttcaaaagatcgcacatttgcacctcaacaccgtgttcctggggtttcgcactttacctcattatgaagagggaagcctgccaattctcaatacaaccaaacttcacatcgtcctgcccatggacacgaacttctgggtgttgctaagagatggcattaagacttccaaaatcctggagatgaccaatatagacggtaagtcacagtttgttagttacgaaatgcagaggaacctcagcctggagaatgccaaaacatctgtgcttctgttgaacaaggtcgatctcctgtgggacgacttattcctgattctacagtttgtgtggcacacttccgtagaacatttccaaatccggaacgttaccttcgggggaaaggcttatctcgatcacaattcatttgactacagcaacacagtgatgcgcaccattaaactggagcatgtccacttccgagtgttttacatccagcaggataagatctatcttttgctgacgaaaatggacattgaaaatctcactataagtaacgcacagatgcctcacatgctgttcccaaattaccccacaaagtttcaatatcttaacttcgccaataacatcctgaccgatgagttgtttaaaagaactattcagctccctcatctgaagacattaatcctgaatggcaacaaactagagaccctctctctggtgtcctgcttcgctaataacacgccacttgaacacttggacctgagccagaatctcctgcaacataagaacgatgagaattgttcgtggccggaaaccgtcgttaacatgaacttatcttacaataagctgtccgactcagtgtttaggtgccttcccaaaagtatacagattttggatctcaacaataaccagatccagacagtacctaaggagactatccacctgatggccctacgggaactgaatattgcgttcaactttctcaccgacctgccaggctgtagccatttctcccgtctttctgtgttgaatatcgagatgaactttattctgagcccctcattagatttcgtccaaagttgccaggaggtgaaaacactcaatgcagggcgcaaccctttcagatgtacttgcgaactgaagaattttatacagcttgagacctattccgaagttatgatggtgggatggagcgactcttacacatgtgagtatccactgaacttgaggggtacccggctcaaagacgtccatctgcacgaactatcatgcaatactgccctgctcatcgtgacgattgtagttatcatgctggtgcttggcttggctgtcgccttctgctgtctgcactttgatttaccctggtacctccgaatgctggggcagtgcacacaaacctggcaccgcgtgagaaagactacccaggagcagcttaagaggaacgtccggttccatgcatttatcagttacagcgagcacgactccctgtgggtgaaaaatgaactaattccgaacctcgagaaggaagatggatctatactgatctgtttgtatgagtcgtacttcgaccctggcaaaagcatttccgagaacatcgtttcatttattgaaaagagttataaatctatcttcgtgctgagccccaattttgtacagaacgagtggtgccactacgagttctattttgctcatcacaatttattccatgaaaactccgatcacataatcctcattctgcttgaaccaatccctttttactgtattcccacacgctatcataagctgaaggccttgctcgagaaaaaggcgtacctggagtggccaaaagacagaaggaagtgcggtctattctgggccaatctgcgtgcagctatcaacgtcaatgtgcttgccacccgggaaatgtacgagctccaaactttcacagaactgaacgaggaatcacgagggagcacgatatctttgatgagaaccgattgtctgtga

SEQ ID NO: 9443 - RNA, 2436 nt, synthetic construct
  misc_feature 1..2436: note = derived and/or modified sequence opt4 fromTLR10__Homo_sapiens__EAW92898
  source 1..2436: mol_type = other RNA
atgagactgatcagaaacatctacatcttctgcagcatcgtgatgaccgccgagggcgacgcccccgagctgcccgaggagagagagctgatgaccaactgcagcaacatgagcctgagaaaggtgcccgccgacctgacccccgccaccaccaccctggacctgagctacaacctgctgttccagctgcagagcagcgacttccacagcgtgagcaagctgagagtgctgatcctgtgccacaacagaatccagcagctggacctgaagaccttcgagttcaacaaggagctgagatacctggacctgagcaacaacagactgaagagcgtgacctggtacctgctggccggcctgagatacctggacctgagcttcaacgacttcgacaccatgcccatctgcgaggaggccggcaacatgagccacctggagatcctgggcctgagcggcgccaagatccagaagagcgacttccagaagatcgcccacctgcacctgaacaccgtgttcctgggcttcagaaccctgccccactacgaggagggcagcctgcccatcctgaacaccaccaagctgcacatcgtgctgcccatggacaccaacttctgggtgctgctgagagacggcatcaagaccagcaagatcctggagatgaccaacatcgacggcaagagccagttcgtgagctacgagatgcagagaaacctgagcctggagaacgccaagaccagcgtgctgctgctgaacaaggtggacctgctgtgggacgacctgttcctgatcctgcagttcgtgtggcacaccagcgtggagcacttccagatcagaaacgtgaccttcggcggcaaggcctacctggaccacaacagcttcgactacagcaacaccgtgatgagaaccatcaagctggagcacgtgcacttcagagtgttctacatccagcaggacaagatctacctgctgctgaccaagatggacatcgagaacctgaccatcagcaacgcccagatgccccacatgctgttccccaactaccccaccaagttccagtacctgaacttcgccaacaacatcctgaccgacgagctgttcaagagaaccatccagctgccccacctgaagaccctgatcctgaacggcaacaagctggagaccctgagcctggtgagctgcttcgccaacaacacccccctggagcacctggacctgagccagaacctgctgcagcacaagaacgacgagaactgcagctggcccgagaccgtggtgaacatgaacctgagctacaacaagctgagcgacagcgtgttcagatgcctgcccaagagcatccagatcctggacctgaacaacaaccagatccagaccgtgcccaaggagaccatccacctgatggccctgagagagctgaacatcgccttcaacttcctgaccgacctgcccggctgcagccacttcagcagactgagcgtgctgaacatcgagatgaacttcatcctgagccccagcctggacttcgtgcagagctgccaggaggtgaagaccctgaacgccggcagaaaccccttcagatgcacctgcgagctgaagaacttcatccagctggagacctacagcgaggtgatgatggtgggctggagcgacagctacacctgcgagtaccccctgaacctgagaggcaccagactgaaggacgtgcacctgcacgagctgagctgcaacaccgccctgctgatcgtgaccatcgtggtgatcatgctggtgctgggcctggccgtggccttctgctgcctgcacttcgacctgccctggtacctgagaatgctgggccagtgcacccagacctggcacagagtgagaaagaccacccaggagcagctgaagagaaacgtgagattccacgccttcatcagctacagcgagcacgacagcctgtgggtgaagaacgagctgatccccaacctggagaaggaggacggcagcatcctgatctgcctgtacgagagctacttcgaccccggcaagagcatcagcgagaacatcgtgagcttcatcgagaagagctacaagagcatcttcgtgctgagccccaacttcgtgcagaacgagtggtgccactacgagttctacttcgcccaccacaacctgttccacgagaacagcgaccacatcatcctgatcctgctggagcccatccccttctactgcatccccaccagataccacaagctgaaggccctgctggagaagaaggcctacctggagtggcccaaggacagaagaaagtgcggcctgttctgggccaacctgagagccgccatcaacgtgaacgtgctggccaccagagagatgtacgagctgcagaccttcaccgagctgaacgaggagagcagaggcagcaccatcagcctgatgagaaccgactgcctgtga

SEQ ID NO: 9444 - RNA, 2436 nt, synthetic construct
  misc_feature 1..2436: note = derived and/or modified sequence opt5 fromTLR10__Homo_sapiens__EAW92898
  source 1..2436: mol_type = other RNA
atgagactgatccggaacatttacatcttctgcagcattgtgatgaccgccgagggcgacgctcccgaactccctgaggaacgcgagctgatgacaaattgttccaacatgtctcttagaaaggtcccggccgatctgacgcccgcgaccacaaccctcgacctgagctataatcttctgtttcagctccaatcctctgatttccacagcgtttccaaactgcgggtgctgatcctctgccataaccgcattcagcagctggaccttaagacatttgagttcaataaagaactgagatacctcgatctgtctaacaatcggcttaagagcgtgacctggtatctgctcgctgggctgcgctacctggacctctcctttaacgatttcgacacaatgcctatctgtgaggaagccggaaatatgagccacctggagatccttggcctgtctggggccaaaattcagaagtccgattttcaaaagatcgctcatctccacctgaacaccgtcttccttggatttagaacgctgccccattatgaagagggcagcctccctattctgaataccacaaaactgcacatcgtgctccccatggacaccaacttctgggttctgcttcgggatgggattaagacatctaaaatcctggagatgaccaatattgacggaaagtcccagtttgtgagctacgaaatgcagcgcaacctctctctggagaatgccaaaacgtccgtccttctgctcaacaaggtggatctgctgtgggacgacctcttcctgatccttcagtttgtttggcacacaagcgtggaacatttccaaatcagaaacgtcaccttcggcggcaaggcttatctggatcacaattcctttgactactctaacacagtgatgcggaccattaaactcgagcatgtgcacttccgcgtcttttacatccagcaggataagatttatctgctgcttaccaaaatggacatcgaaaatctcacaattagcaacgcccagatgcctcacatgctgttcccgaattaccccacgaagtttcaatatctgaacttcgcgaataacatcctcaccgatgagctgtttaaaagaacaatccagcttcctcatctgaagaccctcattctgaatgggaacaaactggagacactttccctcgttagctgcttcgccaataacacgcccctggaacacctggacctctctcagaatctgcttcaacataagaacgatgagaattgttcctggcctgaaaccgtggtgaacatgaacctgagctacaataagctctctgacagcgtctttcggtgcctgcccaaatccatccagattctggatcttaacaataaccagatccagacagtgccgaaggagaccattcacctcatggctctgcgcgaactgaatatcgccttcaactttctcaccgacctgcctggatgttctcatttcagcagactttccgttctgaatatcgagatgaactttattctcagcccctctctggatttcgtgcaatcctgccaggaggtcaaaacactgaatgctggccggaaccctttcagatgtacctgcgaacttaagaattttatccagctcgagacatatagcgaagtgatgatggttgggtggtctgactcctacacgtgtgagtatcccctgaacctgcgcggaacccggctcaaagacgtgcaccttcacgaacttagctgcaatacagccctgctcattgtcaccatcgtggtcattatgctggtgctgggccttgcggttgccttctgctgtctgcattttgatctcccctggtacctgagaatgctcgggcagtgcacacaaacctggcaccgcgtgcggaagacgacccaggagcagctgaagagaaacgtccgcttccatgcttttatctcctactctgagcacgacagcctttgggtgaaaaatgaactgattcctaacctcgagaaggaagatggatccatcctgatctgtctgtatgagtcttacttcgacccgggcaaaagcatttccgagaacatcgttagctttattgaaaagtcttataaatccatcttcgtgcttagccccaattttgtccagaacgagtggtgccactacgagttctattttgcccatcacaatctgttccatgaaaactctgatcacattatcctcatcctgctcgaacctattcccttttactgtatccctacacggtatcataagctgaaggctctgctggagaaaaaggcctacctcgagtggcccaaagacagacgcaagtgcggcctgttctgggccaatctgcgggctgcgattaacgtgaatgtgcttgccaccagagaaatgtacgagctgcaaacattcaccgaactcaacgaggaatcccgcgggagcacgatctctctgatgcggacagattgtctctga

SEQ ID NO: 9445 - protein, 811 aa, synthetic construct [sequence omitted]

SEQ ID NO: 9446 - RNA, 2436 nt, synthetic construct
  misc_feature 1..2436: note = TLR10__Homo_sapiens__AAY78477
  source 1..2436: mol_type = other RNA
atgagactcatcagaaacatttacatattttgtagtatagttatgacagcagagggtgatgctccagagctgccagaagaaagggaactgatgaccaactgctccaacatgtctctaagaaaggttcccgcagacttgaccccagccacaacgacactggatttatcctataacctcctttttcaactccagagttcagattttcattctgtctccaaactgagagttttgattctatgccataacagaattcaacagctggatctcaaaacctttgaattcaacaaggagttaagatatttagatttgtctaataacagactgaagagtgtaacttggtatttactggcaggtctcaggtatttagatctttcttttaatgactttgacaccatgcctatctgtgaggaagctggcaacatgtcacacctggaaatcctaggtttgagtggggcaaaaatacaaaaatcagatttccagaaaattgctcatctgcatctaaatactgtcttcttaggattcagaactcttcctcattatgaagaaggtagcctgcccatcttaaacacaacaaaactgcacattgttttaccaatggacacaaatttctgggttcttttgcgtgatggaatcaagacttcaaaaatattagaaatgacaaatatagatggcaaaagccaatttgtaagttatgaaatgcaacgaaatcttagtttagaacatgctaagacatcggttctattgcttaataaagttgatttactctgggacgaccttttccttatcttacaatttgtttggcatacatcagtggaacactttcagatccgaaatgtgacttttggtggtaaggcttatcttgaccacaattcatttgactactcaaatactgtaatgagaactataaagttggagcatgtacatttcagagtgttttacattcaacaggataaaatctatttgcttttgaccaaaatggacatagaaaacctgacaatatcaaatgcacaaatgccacacatgcttttcccgaattatcctacgaaattccaatatttaaattttgccaataatatcttaacagacgagttgtttaaaagaactctccaactgcctcacttgaaaactctcattttgaatggcaataaactggagacactttctttagtaagttgctttgctaacaacacacccttggaacacttggatctgagtcaaaatctattacaacataaaaatgatgaaaattgctcatggccagaaactgtggtcaatatgaatctgtcatacaataaattgtctgattctgtcttcaggtgcttgcccaaaagtattcaaatacttgacctaaataataaccaaatccaaactgtacctaaagagactattcatctgatggccttacgagaactaaatattgcatttaattttctaactgatctccctggatgcagtcatttcagtagactttcagttctgaacattgaaatgaacttcattctcagcccatctctggattttgttcagagctgccaggaagttaaaactctaaatgcgggaagaaatccattccggtgtacctgtgaattaaaaaatttcattcagcttgaaacatattcagaggtcatgatggttggatggtcagattcatacacctgtgaataccctttaaacctaaggggaactaggttaaaagacgttcatctccacgaattatcttgcaacacagctctgttgattgtcaccattgtggttattatgctagttctggggttggctgtggccttctgctgtctccactttgatctgccctggtatctcaggatgctaggtcaatgcacacaaacatggcacagggttaggaaaacaacccaagaacaactcaagagaaatgtccgattccacgcatttatttcatacagtgaacatgattctctgtgggtgaagaatgaattgatccccaatctagagaaggaagatggttctatcttgatttgcctttatgaaagctactttgaccctggcaaaagcattagtgaaaatattgtaagcttcattgagaaaagctataagtccatctttgttttgtctcccaactttgtccagaatgagtggtgccattatgaattctactttgcccaccacaatctcttccatgaaaattctgatcatataattcttatcttactggaacccattccattctattgcattcccaccaggtatcataaactgaaagctctcctggaaaaaaaagcatacttggaatggcccaaggataggcgtaaatgtgggcttttctgggcaaaccttcgagctgctattaatgttaatgtattagccaccagagaaatgtatgaactgcagacattcacagagttaaatgaagagtctcgaggttctacaatctctctgatgagaacagattgtctataa

SEQ ID NO: 9447 - RNA, 2436 nt, synthetic construct
  misc_feature 1..2436: note = derived and/or modified sequence opt1 fromTLR10__Homo_sapiens__AAY78477
  source 1..2436: mol_type = other RNA
atgcgcctgatccggaacatctacatcttctgcagcatcgtgatgaccgccgagggcgacgcccccgagctcccggaggagcgcgagctgatgaccaactgctccaacatgagcctgcggaaggtccccgcggacctcacgcccgccaccaccaccctggacctgtcctacaacctcctgttccagctgcagagctccgacttccacagcgtgtccaagctccgcgtgctgatcctgtgccacaaccggatccagcagctcgacctgaagacgttcgagttcaacaaggagctgcgctacctcgacctgagcaacaaccggctgaagtccgtcacctggtacctcctggccgggctgcgctacctcgacctgagcttcaacgacttcgacaccatgcccatctgcgaggaggccggcaacatgtcccacctggagatcctcgggctgagcggcgccaagatccagaagtccgacttccagaagatcgcgcacctccacctgaacaccgtgttcctggggttccggacgctgccgcactacgaggagggcagcctccccatcctgaacaccaccaagctgcacatcgtgctccccatggacaccaacttctgggtcctgctgcgcgacggcatcaagacgtccaagatcctcgagatgaccaacatcgacgggaagtcccagttcgtgagctacgagatgcagcggaacctgagcctggagcacgccaagacctccgtgctcctgctgaacaaggtcgacctcctgtgggacgacctgttcctcatcctgcagttcgtgtggcacaccagcgtggagcacttccagatccgcaacgtcacgttcggcgggaaggcctacctggaccacaacagcttcgactactccaacaccgtgatgcggaccatcaagctcgagcacgtgcacttccgcgtcttctacatccagcaggacaagatctacctgctgctgaccaagatggacatcgagaacctcacgatcagcaacgcccagatgccccacatgctgttcccgaactaccccaccaagttccagtacctgaacttcgcgaacaacatcctcaccgacgagctgttcaagcggaccctgcagctcccccacctgaagacgctgatcctcaacggcaacaagctggagaccctgtccctcgtgagctgcttcgccaacaacacgcccctggagcacctggacctctcccagaacctgctgcagcacaagaacgacgagaactgcagctggccggagaccgtggtcaacatgaacctctcctacaacaagctgagcgactccgtgttccgctgcctgcccaagagcatccagatcctcgacctgaacaacaaccagatccagaccgtgcccaaggagaccatccacctgatggccctccgggagctgaacatcgccttcaacttcctgaccgacctccccgggtgctcccacttcagccgcctgtccgtcctgaacatcgagatgaacttcatcctcagcccgtccctggacttcgtgcagagctgccaggaggtgaagaccctgaacgccggccggaaccccttccgctgcacgtgcgagctcaagaacttcatccagctggagacctactccgaggtcatgatggtgggctggagcgactcctacacgtgcgagtaccccctgaacctccgggggacccgcctgaaggacgtccacctccacgagctgagctgcaacaccgcgctgctgatcgtgaccatcgtggtcatcatgctcgtgctgggcctggccgtggccttctgctgcctccacttcgacctgccctggtacctgcgcatgctcgggcagtgcacccagacctggcaccgggtccgcaagaccacgcaggagcagctgaagcggaacgtgcgcttccacgccttcatcagctactccgagcacgacagcctgtgggtgaagaacgagctcatcccgaacctggagaaggaggacggctccatcctgatctgcctctacgagagctacttcgaccccggcaagtccatcagcgagaacatcgtctccttcatcgagaagtcctacaagagcatcttcgtgctgagccccaacttcgtgcagaacgagtggtgccactacgagttctacttcgcccaccacaacctgttccacgagaactccgaccacatcatcctcatcctgctggagcccatcccgttctactgcatccccacccggtaccacaagctcaaggcgctgctggagaagaaggcctacctcgagtggcccaaggaccgccggaagtgcgggctgttctgggccaacctgcgcgccgccatcaacgtcaacgtgctcgcgacccgggagatgtacgagctgcagaccttcacggagctgaacgaggagagccgcggctccaccatcagcctcatgcggaccgactgcctgtga

SEQ ID NO: 9448 - RNA, 2436 nt, synthetic construct
  misc_feature 1..2436: note = derived and/or modified sequence opt2 fromTLR10__Homo_sapiens__AAY78477
  source 1..2436: mol_type = other RNA
atgcgcctcatccgcaacatctacatcttctgctccatcgtcatgaccgccgagggcgacgcccccgagctccccgaggagcgcgagctcatgaccaactgctccaacatgtccctccgcaaggtccccgccgacctcacccccgccaccaccaccctcgacctctcctacaacctcctcttccagctccagtcctccgacttccactccgtctccaagctccgcgtcctcatcctctgccacaaccgcatccagcagctcgacctcaagaccttcgagttcaacaaggagctccgctacctcgacctctccaacaaccgcctcaagtccgtcacctggtacctcctcgccggcctccgctacctcgacctctccttcaacgacttcgacaccatgcccatctgcgaggaggccggcaacatgtcccacctcgagatcctcggcctctccggcgccaagatccagaagtccgacttccagaagatcgcccacctccacctcaacaccgtcttcctcggcttccgcaccctcccccactacgaggagggctccctccccatcctcaacaccaccaagctccacatcgtcctccccatggacaccaacttctgggtcctcctccgcgacggcatcaagacctccaagatcctcgagatgaccaacatcgacggcaagtcccagttcgtctcctacgagatgcagcgcaacctctccctcgagcacgccaagacctccgtcctcctcctcaacaaggtcgacctcctctgggacgacctcttcctcatcctccagttcgtctggcacacctccgtcgagcacttccagatccgcaacgtcaccttcggcggcaaggcctacctcgaccacaactccttcgactactccaacaccgtcatgcgcaccatcaagctcgagcacgtccacttccgcgtcttctacatccagcaggacaagatctacctcctcctcaccaagatggacatcgagaacctcaccatctccaacgcccagatgccccacatgctcttccccaactaccccaccaagttccagtacctcaacttcgccaacaacatcctcaccgacgagctcttcaagcgcaccctccagctcccccacctcaagaccctcatcctcaacggcaacaagctcgagaccctctccctcgtctcctgcttcgccaacaacacccccctcgagcacctcgacctctcccagaacctcctccagcacaagaacgacgagaactgctcctggcccgagaccgtcgtcaacatgaacctctcctacaacaagctctccgactccgtcttccgctgcctccccaagtccatccagatcctcgacctcaacaacaaccagatccagaccgtccccaaggagaccatccacctcatggccctccgcgagctcaacatcgccttcaacttcctcaccgacctccccggctgctcccacttctcccgcctctccgtcctcaacatcgagatgaacttcatcctctccccctccctcgacttcgtccagtcctgccaggaggtcaagaccctcaacgccggccgcaaccccttccgctgcacctgcgagctcaagaacttcatccagctcgagacctactccgaggtcatgatggtcggctggtccgactcctacacctgcgagtaccccctcaacctccgcggcacccgcctcaaggacgtccacctccacgagctctcctgcaacaccgccctcctcatcgtcaccatcgtcgtcatcatgctcgtcctcggcctcgccgtcgccttctgctgcctccacttcgacctcccctggtacctccgcatgctcggccagtgcacccagacctggcaccgcgtccgcaagaccacccaggagcagctcaagcgcaacgtccgcttccacgccttcatctcctactccgagcacgactccctctgggtcaagaacgagctcatccccaacctcgagaaggaggacggctccatcctcatctgcctctacgagtcctacttcgaccccggcaagtccatctccgagaacatcgtctccttcatcgagaagtcctacaagtccatcttcgtcctctcccccaacttcgtccagaacgagtggtgccactacgagttctacttcgcccaccacaacctcttccacgagaactccgaccacatcatcctcatcctcctcgagcccatccccttctactgcatccccacccgctaccacaagctcaaggccctcctcgagaagaaggcctacctcgagtggcccaaggaccgccgcaagtgcggcctcttctgggccaacctccgcgccgccatcaacgtcaacgtcctcgccacccgcgagatgtacgagctccagaccttcaccgagctcaacgaggagtcccgcggctccaccatctccctcatgcgcaccgactgcctctga

SEQ ID NO: 9449 - RNA, 2436 nt, synthetic construct
  misc_feature 1..2436: note = derived and/or modified sequence opt3 fromTLR10__Homo_sapiens__AAY78477
  source 1..2436: mol_type = other RNA
atgagactgatcaggaacatttacatattctgcagcatcgtgatgaccgccgagggcgacgctcccgaactccctgaggaacgggagcttatgacaaattgttccaacatgtctctgcgcaaggtcccagcagatttgactccggccacgaccacattagacctgtcatataatctactctttcagctgcaaagtagcgatttccactccgtttctaaacttcgagtgctgattttgtgccataaccgtatccagcagctcgacctgaagacttttgaatttaataaagagctgagatacctcgatttatcgaacaataggctgaagtcagtaacctggtatcttttggcggggctgcggtacctagacctcagcttcaacgatttcgacacaatgcccatttgtgaggaagctggaaatatgagtcacctggagatccttggtctgtccggcgccaaaatacagaagtctgattttcaaaagatcgcacatttgcacctcaacaccgtgttcctggggtttcgcactttacctcattatgaagagggaagcctgccaattctcaatacaaccaaacttcacatcgtcctgcccatggacacgaacttctgggtgttgctaagagatggcattaagacttccaaaatcctggagatgaccaatatagacggtaagtcacagtttgttagttacgaaatgcagaggaacctcagcctggagcacgccaaaacatctgtgcttctgttgaataaggtcgatctcctgtgggacgacttattcctgattctacagtttgtgtggcatacttccgtagaacacttccaaatccggaacgttaccttcgggggaaaggcttatctcgatcataactcatttgactacagcaatacagtgatgcgcaccattaaactggagcacgtccacttccgagtgttttacatccagcaggataagatctatcttttgctgacgaaaatggacattgaaaacctcactataagtaatgcacagatgcctcatatgctgttcccaaactaccccacaaagtttcaatatcttaatttcgccaacaatatcctgaccgatgagttgtttaaaagaactctccagctgcctcacttaaagacactgattctaaacggcaataaactcgagaccctgtctcttgtgtcctgcttcgctaacaatacgccattggaacatctggacctcagccagaacctgttacaacacaagaatgatgagaactgttcgtggccggaaaccgtcgttaatatgaacctgtcttacaacaaactttccgactcagtgtttaggtgcttgcccaagagtatccagatactcgatctgaataacaatcagattcagacagtacctaaggagactatccatctaatggccctgcgggaactcaacatcgcgttcaattttctgaccgaccttccaggctgtagccacttctcccgtttgtctgtgctgaacattgagatgaattttatcttaagcccctcactcgatttcgtccaaagttgccaggaggtgaaaacactgaacgcagggcgcaatcctttcagatgtacttgcgaacttaagaactttattcagctggagacctattccgaagttatgatggtgggatggagcgactcttacacatgtgagtatccattgaatctcaggggtacccggctgaaagacgtccacctacatgaactgtcatgcaacactgccctcctgatagtgacgatcgtagttattatgcttgtgttgggcctggctgtcgccttctgctgtttacactttgatctcccctggtacctgcgaatgcttgggcagtgcacacaaacctggcatcgcgtgagaaagactacccaggagcagctgaagaggaatgtccggttccacgcatttatcagttacagcgagcacgactccctatgggtgaaaaacgaactcatcccgaatctggagaaggaagatggatctattttgatatgtctgtatgagtcgtacttcgaccctggcaaaagcatctccgagaacattgtttcatttatcgaaaagagttataaatctattttcgtgttaagccccaactttgtacagaatgagtggtgccattacgagttctattttgctcaccataacctcttccacgaaaattccgatcatatcatactgatccttctggaaccaattcctttttactgtatccccacacgctatcacaagttgaaggccctcctggagaaaaaggcgtacctagagtggccaaaagacagaaggaagtgcggtctgttctgggccaaccttcgtgcagctattaatgtcaacgtgctcgccacccgggaaatgtacgagctgcaaactttcacagaattgaatgaggaatcacgagggagcacgatctctctgatgagaaccgattgtttatga

SEQ ID NO: 9450 - RNA, 2436 nt, synthetic construct
  misc_feature 1..2436: note = derived and/or modified sequence opt4 fromTLR10__Homo_sapiens__AAY78477
  source 1..2436: mol_type = other RNA
atgagactgatcagaaacatctacatcttctgcagcatcgtgatgaccgccgagggcgacgcccccgagctgcccgaggagagagagctgatgaccaactgcagcaacatgagcctgagaaaggtgcccgccgacctgacccccgccaccaccaccctggacctgagctacaacctgctgttccagctgcagagcagcgacttccacagcgtgagcaagctgagagtgctgatcctgtgccacaacagaatccagcagctggacctgaagaccttcgagttcaacaaggagctgagatacctggacctgagcaacaacagactgaagagcgtgacctggtacctgctggccggcctgagatacctggacctgagcttcaacgacttcgacaccatgcccatctgcgaggaggccggcaacatgagccacctggagatcctgggcctgagcggcgccaagatccagaagagcgacttccagaagatcgcccacctgcacctgaacaccgtgttcctgggcttcagaaccctgccccactacgaggagggcagcctgcccatcctgaacaccaccaagctgcacatcgtgctgcccatggacaccaacttctgggtgctgctgagagacggcatcaagaccagcaagatcctggagatgaccaacatcgacggcaagagccagttcgtgagctacgagatgcagagaaacctgagcctggagcacgccaagaccagcgtgctgctgctgaacaaggtggacctgctgtgggacgacctgttcctgatcctgcagttcgtgtggcacaccagcgtggagcacttccagatcagaaacgtgaccttcggcggcaaggcctacctggaccacaacagcttcgactacagcaacaccgtgatgagaaccatcaagctggagcacgtgcacttcagagtgttctacatccagcaggacaagatctacctgctgctgaccaagatggacatcgagaacctgaccatcagcaacgcccagatgccccacatgctgttccccaactaccccaccaagttccagtacctgaacttcgccaacaacatcctgaccgacgagctgttcaagagaaccctgcagctgccccacctgaagaccctgatcctgaacggcaacaagctggagaccctgagcctggtgagctgcttcgccaacaacacccccctggagcacctggacctgagccagaacctgctgcagcacaagaacgacgagaactgcagctggcccgagaccgtggtgaacatgaacctgagctacaacaagctgagcgacagcgtgttcagatgcctgcccaagagcatccagatcctggacctgaacaacaaccagatccagaccgtgcccaaggagaccatccacctgatggccctgagagagctgaacatcgccttcaacttcctgaccgacctgcccggctgcagccacttcagcagactgagcgtgctgaacatcgagatgaacttcatcctgagccccagcctggacttcgtgcagagctgccaggaggtgaagaccctgaacgccggcagaaaccccttcagatgcacctgcgagctgaagaacttcatccagctggagacctacagcgaggtgatgatggtgggctggagcgacagctacacctgcgagtaccccctgaacctgagaggcaccagactgaaggacgtgcacctgcacgagctgagctgcaacaccgccctgctgatcgtgaccatcgtggtgatcatgctggtgctgggcctggccgtggccttctgctgcctgcacttcgacctgccctggtacctgagaatgctgggccagtgcacccagacctggcacagagtgagaaagaccacccaggagcagctgaagagaaacgtgagattccacgccttcatcagctacagcgagcacgacagcctgtgggtgaagaacgagctgatccccaacctggagaaggaggacggcagcatcctgatctgcctgtacgagagctacttcgaccccggcaagagcatcagcgagaacatcgtgagcttcatcgagaagagctacaagagcatcttcgtgctgagccccaacttcgtgcagaacgagtggtgccactacgagttctacttcgcccaccacaacctgttccacgagaacagcgaccacatcatcctgatcctgctggagcccatccccttctactgcatccccaccagataccacaagctgaaggccctgctggagaagaaggcctacctggagtggcccaaggacagaagaaagtgcggcctgttctgggccaacctgagagccgccatcaacgtgaacgtgctggccaccagagagatgtacgagctgcagaccttcaccgagctgaacgaggagagcagaggcagcaccatcagcctgatgagaaccgactgcctgtga

SEQ ID NO: 9451 - RNA, 2436 nt, synthetic construct
  misc_feature 1..2436: note = derived and/or modified sequence opt5 fromTLR10__Homo_sapiens__AAY78477
  source 1..2436: mol_type = other RNA
atgagactgatccggaacatttacatcttctgcagcattgtgatgaccgccgagggcgacgctcccgaactccctgaggaacgcgagctgatgacaaattgttccaacatgtctcttagaaaggtcccggccgatctgacgcccgcgaccacaaccctcgacctgagctataatcttctgtttcagctccaatcctctgatttccacagcgtttccaaactgcgggtgctgatcctctgccataaccgcattcagcagctggaccttaagacatttgagttcaataaagagctgagatacctcgatctgtctaacaatcggcttaagagcgtgacctggtatctgctcgctgggctgcgctacctggacctctcctttaacgatttcgacacaatgcctatctgtgaggaagccggaaatatgagccacctggagatccttggcctgtctggggccaaaattcagaagtccgattttcaaaagatcgctcatctccacctgaacaccgtcttccttggatttagaacgctgccccattatgaagagggcagcctccctattctgaataccacaaaactgcacatcgtgctccccatggacaccaacttctgggttctgcttcgggatgggattaagacatctaaaatcctggagatgaccaatattgacggaaagtcccagtttgtgagctacgaaatgcagcgcaacctctctctggagcacgccaaaacgtccgtccttctgctcaataaggtggatctgctgtgggacgacctcttcctgatccttcagtttgtttggcatacaagcgtggaacacttccaaatcagaaacgtcaccttcggcggcaaggcttatctggatcataactcctttgactactctaatacagtgatgcggaccattaaactcgagcacgtgcacttccgcgtcttttacatccagcaggataagatttatctgctgcttaccaaaatggacatcgaaaacctcacaattagcaatgcccagatgcctcatatgctgttcccgaactaccccacgaagtttcaatatctgaatttcgcgaacaatatcctcaccgatgagctgtttaaaagaacacttcagctgcctcacctcaagaccctgatcctgaacgggaataaacttgagacactctccctggttagctgcttcgccaacaatacgcccctggaacatctcgacctgtctcagaaccttctgcaacacaagaatgatgagaactgttcctggcctgaaaccgtggtgaatatgaacctcagctacaacaagctgtctgacagcgtctttcggtgcctgcccaaatccattcagatccttgatctcaataacaatcagattcagacagtgccgaaggagaccatccatctgatggctctgcgcgaactcaacattgccttcaattttctgaccgaccttcctggatgttctcacttcagcagactgtccgttctcaacatcgagatgaattttatcctgagcccctctctggatttcgtgcaatcctgccaggaggtcaaaacacttaacgctggccggaatcctttcagatgtacctgcgaactcaagaactttattcagctggagacatatagcgaagtgatgatggttgggtggtctgactcctacacgtgtgagtatcccctgaatctccgcggaacccggctgaaagacgtgcaccttcatgaactgagctgcaacacagccctcctgatcgtcaccattgtggtcatcatgctggtgcttggcctggcggttgccttctgctgtctccactttgatctgccctggtacctcagaatgctggggcagtgcacacaaacctggcatcgcgtgcggaagacgacccaggagcagcttaagagaaatgtccgcttccacgcttttatttcctactctgagcacgacagcctgtgggtgaaaaacgaactcatccctaatctggagaaggaagatggatccattctgatctgtctttatgagtcttacttcgacccgggcaaaagcatctccgagaacattgttagctttatcgaaaagtcttataaatccattttcgtgctgagccccaactttgtccagaatgagtggtgccattacgagttctattttgcccaccataacctcttccacgaaaattctgatcatatcattctgatcctcctggaacctatccccttttactgtattcctacacggtatcacaaacttaaggctctgctcgaaaagaaggcctacctggagtggcccaaagacagacgcaagtgcggcctgttctgggccaaccttcgggctgcgatcaatgtgaacgtgctggccaccagagaaatgtacgagctccaaacattcaccgaactgaatgaggaatcccgcgggagcacgatttctctcatgcggacagattgtctgtga

SEQ ID NO: 9452 - protein, 811 aa, synthetic construct [sequence omitted]

SEQ ID NO: 9453 - RNA, 2436 nt, synthetic construct
  misc_feature 1..2436: note = TLR10__Homo_sapiens__AAY78478
  source 1..2436: mol_type = other RNA
atgagactcatcagaaacatttacatattttgtagtatagttatgacagcagagggtgatgctccagagctgccagaagaaagggaactgatgaccaactgctccaacatgtctctaagaaaggttcccgcagacttgaccccagccacaacaacactggatttatcctataacctcctttttcaactccagagttcagattttcattctgtctccaaactgagagttttgattctatgccataacagaattcaacagctggatctcaaaacctttgaattcaacaaggagttaagatatttagatttgtctaataacagactgaagagtgtaacttggtatttactggcaggtctcaggtatttagatctttcttttaatgactttgacaccatgcctatctgtgaggaagctggcaacatgtcacacctggaaatcctaggtttgagtggggcaaaaatacaaaaatcagatttccagaaaatttctcatctgcatctaaatactgtcttcttaggattcagaactcttcctcattatgaagaaggtagcctgcccatcttaaacacaacaaaactgcacattgttttaccaatggacacaaatttctgggttcttttgcgtgatggaatcaagacttcaaaaatattagaaatgacaaatatagatggcaaaagccaatttgtaagttatgaaatgcaacgaaatcttagtttagaaaatgctaagacatcggttctattgcttaataaagttgatttactctgggacgaccttttccttatcttacaatttgtttggcatacatcagtggaacactttcagatccgaaatgtgacttttggtggtaaggcttatcttgaccacaattcatttgactactcaaatactgtaatgagaactataaaattggagcatgtacatttcagagtgttttacattcaacaggataaaatctatttgcttttgaccaaaacggacatagaaaacctgacaatatcaaatgcacaaatgccacacatgcttttccctaattatcctacgaaattccaatatttaaattttgccaataatatcttaacagacgagttgtttaaaagaactctccaactgcctcacttgaaaactctcattttgaatggcaataaactggagacactttctttagtaagttgctttgctaacaacacacccttggaacacttggatctgagtcaaaatctattacaacataaaaatgatgaaaattgctcatggccagaaactgtggtcaatatgaatctgtcatacaataaattgtctgattctgtcttcaggtgcttgcccaaaagtattcaaatacttgacctaaataataaccaaatccaaactgtacctaaagagactattcatctgatggccttacgagaactaaatattgcatttaattttctaactgatctccctggatgcagtcatttcagtagactttcagttctgaacattgaaatgaacttcattctcagcccatctctggattttgttcagagctgccaggaagttaaaactctaaatgcgggaagaaatccattccggtgtacctgtgaattaaaaaatttcattcagcttgaaacatattcagaggtcatgatggttggatggtcagattcatacacctgtgaataccctttaaacctaaggggaactaggttaaaagacgttcatctccacgaattatcttgcaacacagctctgttgattgtcaccattgtggttattatgctagttctggggttggctgtggccttctgctgtctccactttgatctgccctggtatctcaggatgctaggtcaatgcacacaaacatggcacagggttaggaaaacaacccaagaacaactcaagagaaatgtccgattccacgcatttatttcatacagtgaacatgattctctgtgggtgaagaatgaattgatccccaatctagagaaggaagatggttctatcttgatttgcctttatgaaagctactttgaccctggcaaaagcattagtgaaaatattgtaagcttcattgagaaaagctataagtccatctttgttttgtctcccaactttgtccagaatgagtggtgccattatgaattctactttgcccaccacaatctcttccatgaaaattctgatcacataattcttatcttactggaacccattccattctattgcattcccaccaggtatcataaactgaaagctctcctggaaaaaaaagcatacttggaatggcccaaggataggcgtaaatgtgggcttttctgggcaaaccttcgagctgctattaatgttaatgtattagccaccagagaaatgtatgaactgcagacattcacagagttaaatgaagagtctcgaggttctacaatctctctgatgagaacagactgtctataa

SEQ ID NO: 9454 - RNA, 2436 nt, synthetic construct
  misc_feature 1..2436: note = derived and/or modified sequence opt1 fromTLR10__Homo_sapiens__AAY78478
  source 1..2436: mol_type = other RNA
atgcgcctgatccggaacatctacatcttctgcagcatcgtgatgaccgccgagggcgacgcccccgagctcccggaggagcgcgagctgatgaccaactgctccaacatgagcctgcggaaggtccccgcggacctcacgcccgccaccaccaccctggacctgtcctacaacctcctgttccagctgcagagctccgacttccacagcgtgtccaagctccgcgtgctgatcctgtgccacaaccggatccagcagctcgacctgaagacgttcgagttcaacaaggagctgcgctacctcgacctgagcaacaaccggctgaagtccgtcacctggtacctcctggccgggctgcgctacctcgacctgagcttcaacgacttcgacaccatgcccatctgcgaggaggccggcaacatgtcccacctggagatcctcgggctgagcggcgccaagatccagaagtccgacttccagaagatcagccacctccacctgaacaccgtgttcctggggttccggacgctgccgcactacgaggagggctccctccccatcctgaacaccaccaagctgcacatcgtgctccccatggacaccaacttctgggtcctgctgcgcgacggcatcaagacgagcaagatcctcgagatgaccaacatcgacgggaagtcccagttcgtgagctacgagatgcagcggaacctgtccctggagaacgcgaagaccagcgtgctcctgctgaacaaggtcgacctcctgtgggacgacctgttcctcatcctgcagttcgtgtggcacaccagcgtggagcacttccagatccgcaacgtcacgttcggcgggaaggcctacctggaccacaactccttcgactacagcaacaccgtgatgcggaccatcaagctcgagcacgtgcacttccgcgtcttctacatccagcaggacaagatctacctgctgctgaccaagacggacatcgagaacctcaccatctccaacgcccagatgccccacatgctgttcccgaactaccccaccaagttccagtacctgaacttcgccaacaacatcctcaccgacgagctgttcaagcggacgctgcagctcccccacctgaagaccctgatcctcaacggcaacaagctggagaccctgagcctcgtgtcctgcttcgcgaacaacacgcccctggagcacctggacctcagccagaacctgctgcagcacaagaacgacgagaactgctcctggccggagaccgtggtcaacatgaacctcagctacaacaagctgtccgacagcgtgttccgctgcctgcccaagtccatccagatcctcgacctgaacaacaaccagatccagaccgtgcccaaggagaccatccacctgatggccctccgggagctgaacatcgccttcaacttcctgaccgacctccccgggtgcagccacttctcccgcctgagcgtcctgaacatcgagatgaacttcatcctctccccgagcctggacttcgtgcagtcctgccaggaggtgaagacgctgaacgccggccggaaccccttccgctgcacgtgcgagctcaagaacttcatccagctggagacctacagcgaggtcatgatggtgggctggtccgacagctacacgtgcgagtaccccctgaacctccgggggacccgcctgaaggacgtccacctccacgagctgagctgcaacaccgccctgctgatcgtgaccatcgtggtcatcatgctcgtgctgggcctggcggtggccttctgctgcctccacttcgacctgccctggtacctgcgcatgctcgggcagtgcacccagacctggcaccgggtccgcaagaccacccaggagcagctgaagcggaacgtgcgcttccacgccttcatctcctacagcgagcacgactccctgtgggtgaagaacgagctcatcccgaacctggagaaggaggacggcagcatcctgatctgcctctacgagtcctacttcgaccccggcaagagcatctccgagaacatcgtcagcttcatcgagaagtcctacaagagcatcttcgtgctgtcccccaacttcgtgcagaacgagtggtgccactacgagttctacttcgcccaccacaacctgttccacgagaacagcgaccacatcatcctcatcctgctggagcccatcccgttctactgcatccccacccggtaccacaagctcaaggccctgctggagaagaaggcgtacctcgagtggcccaaggaccgccggaagtgcgggctgttctgggccaacctgcgcgccgccatcaacgtcaacgtgctcgccacccgggagatgtacgagctgcagacgttcaccgagctgaacgaggagtcccgcggcagcaccatctccctcatgcggaccgactgcctgtga

SEQ ID NO: 9455 - RNA, 2436 nt, synthetic construct
  misc_feature 1..2436: note = derived and/or modified sequence opt2 fromTLR10__Homo_sapiens__AAY78478
  source 1..2436: mol_type = other RNA
atgcgcctcatccgcaacatctacatcttctgctccatcgtcatgaccgccgagggcgacgcccccgagctccccgaggagcgcgagctcatgaccaactgctccaacatgtccctccgcaaggtccccgccgacctcacccccgccaccaccaccctcgacctctcctacaacctcctcttccagctccagtcctccgacttccactccgtctccaagctccgcgtcctcatcctctgccacaaccgcatccagcagctcgacctcaagaccttcgagttcaacaaggagctccgctacctcgacctctccaacaaccgcctcaagtccgtcacctggtacctcctcgccggcctccgctacctcgacctctccttcaacgacttcgacaccatgcccatctgcgaggaggccggcaacatgtcccacctcgagatcctcggcctctccggcgccaagatccagaagtccgacttccagaagatctcccacctccacctcaacaccgtcttcctcggcttccgcaccctcccccactacgaggagggctccctccccatcctcaacaccaccaagctccacatcgtcctccccatggacaccaacttctgggtcctcctccgcgacggcatcaagacctccaagatcctcgagatgaccaacatcgacggcaagtcccagttcgtctcctacgagatgcagcgcaacctctccctcgagaacgccaagacctccgtcctcctcctcaacaaggtcgacctcctctgggacgacctcttcctcatcctccagttcgtctggcacacctccgtcgagcacttccagatccgcaacgtcaccttcggcggcaaggcctacctcgaccacaactccttcgactactccaacaccgtcatgcgcaccatcaagctcgagcacgtccacttccgcgtcttctacatccagcaggacaagatctacctcctcctcaccaagaccgacatcgagaacctcaccatctccaacgcccagatgccccacatgctcttccccaactaccccaccaagttccagtacctcaacttcgccaacaacatcctcaccgacgagctcttcaagcgcaccctccagctcccccacctcaagaccctcatcctcaacggcaacaagctcgagaccctctccctcgtctcctgcttcgccaacaacacccccctcgagcacctcgacctctcccagaacctcctccagcacaagaacgacgagaactgctcctggcccgagaccgtcgtcaacatgaacctctcctacaacaagctctccgactccgtcttccgctgcctccccaagtccatccagatcctcgacctcaacaacaaccagatccagaccgtccccaaggagaccatccacctcatggccctccgcgagctcaacatcgccttcaacttcctcaccgacctccccggctgctcccacttctcccgcctctccgtcctcaacatcgagatgaacttcatcctctccccctccctcgacttcgtccagtcctgccaggaggtcaagaccctcaacgccggccgcaaccccttccgctgcacctgcgagctcaagaacttcatccagctcgagacctactccgaggtcatgatggtcggctggtccgactcctacacctgcgagtaccccctcaacctccgcggcacccgcctcaaggacgtccacctccacgagctctcctgcaacaccgccctcctcatcgtcaccatcgtcgtcatcatgctcgtcctcggcctcgccgtcgccttctgctgcctccacttcgacctcccctggtacctccgcatgctcggccagtgcacccagacctggcaccgcgtccgcaagaccacccaggagcagctcaagcgcaacgtccgcttccacgccttcatctcctactccgagcacgactccctctgggtcaagaacgagctcatccccaacctcgagaaggaggacggctccatcctcatctgcctctacgagtcctacttcgaccccggcaagtccatctccgagaacatcgtctccttcatcgagaagtcctacaagtccatcttcgtcctctcccccaacttcgtccagaacgagtggtgccactacgagttctacttcgcccaccacaacctcttccacgagaactccgaccacatcatcctcatcctcctcgagcccatccccttctactgcatccccacccgctaccacaagctcaaggccctcctcgagaagaaggcctacctcgagtggcccaaggaccgccgcaagtgcggcctcttctgggccaacctccgcgccgccatcaacgtcaacgtcctcgccacccgcgagatgtacgagctccagaccttcaccgagctcaacgaggagtcccgcggctccaccatctccctcatgcgcaccgactgcctctga

SEQ ID NO: 9456 - RNA, 2436 nt, synthetic construct
  misc_feature 1..2436: note = derived and/or modified sequence opt3 fromTLR10__Homo_sapiens__AAY78478
  source 1..2436: mol_type = other RNA
atgagactgatcaggaacatttacatattctgcagcatcgtgatgaccgccgagggcgacgctcccgaactccctgaggaacgggagcttatgacaaattgttccaacatgtctctgcgcaaggtcccagcagatttgactccggccacgaccacattagacctgtcatataatctactctttcagctgcaaagtagcgatttccactccgtttctaaacttcgagtgctgattttgtgccataaccgtatccagcagctcgacctgaagacttttgagttcaataaagaactgagatacctcgatttatcgaacaataggctgaagtcagtaacctggtatcttttggcggggctgcggtacctagacctcagctttaacgatttcgacacaatgcccatttgtgaggaagctggaaatatgagtcacctggagatccttggtctgtccggcgccaaaatacagaagtctgattttcaaaagatcagccatttgcacctcaacaccgtgttcctggggtttcgcactttacctcattatgaagagggatccctgccaattctcaatacaaccaaacttcacatcgtcctgcccatggacacgaacttctgggtgttgctaagagatggcattaagacttcaaaaatcctggagatgaccaatatagacggtaagagtcagtttgttagctacgaaatgcagaggaacctctctctggagaatgcaaaaacatccgtgcttctgttgaacaaggtcgatctcctgtgggacgacttattcctgattctacagtttgtgtggcacacttcagtagaacatttccaaatccggaacgttaccttcgggggaaaggcctatctcgatcacaatagctttgactacagtaacacagtgatgcgcaccattaaactggagcatgtccacttccgagtgttttacatccagcaggataagatctatcttttgctgacgaaaactgacattgaaaatctcacaatatctaacgctcagatgcctcacatgctgttcccaaattaccccaccaagtttcaatatcttaacttcgcaaataacatcctgactgatgagttgtttaaaagaacactccagctgcctcatttaaagaccctgattctaaatggcaacaaactcgagacgctgtcccttgtgagctgcttcgccaataacaccccattggaacacctggacctctcgcagaatctgttacaacataagaacgatgagaattgttcttggccggaaacagtcgttaacatgaacctgtcctacaataaactttcagacagtgtgtttaggtgcttgcccaagagcatccagatactcgatctgaacaataaccagattcagactgtacctaaggagaccatccacctaatggctctgcgggaactcaatatcgccttcaactttctgacagaccttccaggctgttcccatttctctcgtttgagcgtgctgaatattgagatgaactttatcttatcacccagtctcgatttcgtccaatcctgccaggaggtgaaaactctgaatgcggggcgcaaccctttcagatgtacctgcgaacttaagaattttattcagctggagacatatagcgaagttatgatggtgggatggtctgactcatacacctgtgagtatccattgaacctcaggggtactcggctgaaagacgtccacctacacgaactgagttgcaatacggcactcctgatagtgacaatcgtagttattatgcttgtgttgggcctggccgtcgctttctgctgtttacattttgatctcccctggtacctgcgaatgcttgggcagtgcacccaaacttggcaccgcgtgagaaagaccacacaggagcagctgaagaggaacgtccggttccatgcctttatcagctactccgagcacgactctctatgggtgaaaaatgaactcatcccgaacctggagaaggaagatggatcgattttgatatgtctgtatgagagctacttcgaccctggcaaatccatctcagagaacattgttagttttatcgaaaagtcttataaaagcattttcgtgttatcccccaattttgtacagaacgagtggtgccactacgagttctattttgcacatcacaatctcttccatgaaaactcagatcacatcatactgatccttctggaaccaattcctttttactgtatccccacccgctatcataagttgaaggctctcctggagaaaaaggcctacctagagtggccaaaagacagaaggaagtgcggtctgttctgggcgaatcttcgtgccgcaattaacgtcaatgtgctcgctactcgggaaatgtacgagctgcaaacattcacggaattgaacgaggaaagccgagggtctaccatctccctgatgagaactgattgtttatga

SEQ ID NO: 9457 - RNA, 2436 nt, synthetic construct
  misc_feature 1..2436: note = derived and/or modified sequence opt4 fromTLR10__Homo_sapiens__AAY78478
  source 1..2436: mol_type = other RNA
atgagactgatcagaaacatctacatcttctgcagcatcgtgatgaccgccgagggcgacgcccccgagctgcccgaggagagagagctgatgaccaactgcagcaacatgagcctgagaaaggtgcccgccgacctgacccccgccaccaccaccctggacctgagctacaacctgctgttccagctgcagagcagcgacttccacagcgtgagcaagctgagagtgctgatcctgtgccacaacagaatccagcagctggacctgaagaccttcgagttcaacaaggagctgagatacctggacctgagcaacaacagactgaagagcgtgacctggtacctgctggccggcctgagatacctggacctgagcttcaacgacttcgacaccatgcccatctgcgaggaggccggcaacatgagccacctggagatcctgggcctgagcggcgccaagatccagaagagcgacttccagaagatcagccacctgcacctgaacaccgtgttcctgggcttcagaaccctgccccactacgaggagggcagcctgcccatcctgaacaccaccaagctgcacatcgtgctgcccatggacaccaacttctgggtgctgctgagagacggcatcaagaccagcaagatcctggagatgaccaacatcgacggcaagagccagttcgtgagctacgagatgcagagaaacctgagcctggagaacgccaagaccagcgtgctgctgctgaacaaggtggacctgctgtgggacgacctgttcctgatcctgcagttcgtgtggcacaccagcgtggagcacttccagatcagaaacgtgaccttcggcggcaaggcctacctggaccacaacagcttcgactacagcaacaccgtgatgagaaccatcaagctggagcacgtgcacttcagagtgttctacatccagcaggacaagatctacctgctgctgaccaagaccgacatcgagaacctgaccatcagcaacgcccagatgccccacatgctgttccccaactaccccaccaagttccagtacctgaacttcgccaacaacatcctgaccgacgagctgttcaagagaaccctgcagctgccccacctgaagaccctgatcctgaacggcaacaagctggagaccctgagcctggtgagctgcttcgccaacaacacccccctggagcacctggacctgagccagaacctgctgcagcacaagaacgacgagaactgcagctggcccgagaccgtggtgaacatgaacctgagctacaacaagctgagcgacagcgtgttcagatgcctgcccaagagcatccagatcctggacctgaacaacaaccagatccagaccgtgcccaaggagaccatccacctgatggccctgagagagctgaacatcgccttcaacttcctgaccgacctgcccggctgcagccacttcagcagactgagcgtgctgaacatcgagatgaacttcatcctgagccccagcctggacttcgtgcagagctgccaggaggtgaagaccctgaacgccggcagaaaccccttcagatgcacctgcgagctgaagaacttcatccagctggagacctacagcgaggtgatgatggtgggctggagcgacagctacacctgcgagtaccccctgaacctgagaggcaccagactgaaggacgtgcacctgcacgagctgagctgcaacaccgccctgctgatcgtgaccatcgtggtgatcatgctggtgctgggcctggccgtggccttctgctgcctgcacttcgacctgccctggtacctgagaatgctgggccagtgcacccagacctggcacagagtgagaaagaccacccaggagcagctgaagagaaacgtgagattccacgccttcatcagctacagcgagcacgacagcctgtgggtgaagaacgagctgatccccaacctggagaaggaggacggcagcatcctgatctgcctgtacgagagctacttcgaccccggcaagagcatcagcgagaacatcgtgagcttcatcgagaagagctacaagagcatcttcgtgctgagccccaacttcgtgcagaacgagtggtgccactacgagttctacttcgcccaccacaacctgttccacgagaacagcgaccacatcatcctgatcctgctggagcccatccccttctactgcatccccaccagataccacaagctgaaggccctgctggagaagaaggcctacctggagtggcccaaggacagaagaaagtgcggcctgttctgggccaacctgagagccgccatcaacgtgaacgtgctggccaccagagagatgtacgagctgcagaccttcaccgagctgaacgaggagagcagaggcagcaccatcagcctgatgagaaccgactgcctgtga

SEQ ID NO: 9458 - RNA, 2436 nt, synthetic construct
  misc_feature 1..2436: note = derived and/or modified sequence opt5 fromTLR10__Homo_sapiens__AAY78478
  source 1..2436: mol_type = other RNA
atgagactgatccggaacatttacatcttctgcagcattgtgatgaccgccgagggcgacgctcccgaactccctgaggaacgcgagctgatgacaaattgttccaacatgtctcttagaaaggtcccggccgatctgacgcccgcgaccacaaccctcgacctgagctataatcttctgtttcagctccaatcctctgatttccacagcgtttccaaactgcgggtgctgatcctctgccataaccgcattcagcagctggaccttaagacatttgagttcaataaagaactgagatacctcgatctgtctaacaatcggcttaagagcgtgacctggtatctgctcgctgggctgcgctacctggacctctcctttaacgatttcgacacaatgcctatctgtgaggaagccggaaatatgagccacctggagatccttggcctgtctggggccaaaattcagaagtccgattttcaaaagatcagccatctccacctgaacaccgtcttccttggatttagaacgctgccccattatgaagagggctctctccctattctgaataccacaaaactgcacatcgtgctccccatggacaccaacttctgggttctgcttcgggatgggattaagacatccaaaatcctggagatgaccaatattgacggaaagagccagtttgtgtcttacgaaatgcagcgcaacctctccctggagaatgctaaaacgagcgtccttctgctcaacaaggtggatctgctgtgggacgacctcttcctgatccttcagtttgtttggcacacatccgtggaacatttccaaatcagaaacgtcaccttcggcggcaaggcctatctggatcacaattcttttgactacagcaacacagtgatgcggaccattaaactcgagcatgtgcacttccgcgtcttttacatccagcaggataagatttatctgctgcttaccaaaacagacatcgaaaatctcacgatttccaacgctcagatgcctcacatgctgttcccgaattaccccaccaagtttcaatatctgaacttcgccaataacatcctcacagatgagctgtttaaaagaacccttcagctgcctcatctcaagacactgatcctgaatgggaacaaacttgagaccctcagcctggtttcttgcttcgcgaataacacgcccctggaacacctcgacctgtcccagaatcttctgcaacataagaacgatgagaattgtagctggcctgaaacagtggtgaacatgaacctctcttacaataagctgagcgactccgtctttcggtgcctgcccaaatctattcagatccttgatctcaacaataaccagattcagaccgtgccgaaggagaccatccacctgatggccctgcgcgaactcaatattgctttcaactttctgacagaccttcctggatgtagccatttctccagactgagcgttctcaatatcgagatgaactttatcctgtctccctccctggatttcgtgcaaagctgccaggaggtcaaaacccttaatgccggccggaaccctttcagatgtacatgcgaactcaagaattttattcagctggagacgtattctgaagtgatgatggttgggtggtccgacagctacacctgtgagtatcccctgaacctccgcggaacacggctgaaagacgtgcaccttcacgaactgtcctgcaataccgctctcctgatcgtcacaattgtggtcatcatgctggtgcttggcctggccgttgcgttctgctgtctccattttgatctgccctggtacctcagaatgctggggcagtgcacccaaacgtggcaccgcgtgcggaagaccacacaggagcagcttaagagaaacgtccgcttccatgcctttatttcttacagcgagcacgactccctgtgggtgaaaaatgaactcatccctaacctggagaaggaagatggatctattctgatctgtctttatgagagctacttcgacccgggcaaatccatcagcgagaacattgtttcttttatcgaaaagtcctataaaagcattttcgtgctgtctcccaattttgtccagaacgagtggtgccactacgagttctattttgctcatcacaatctcttccatgaaaactccgatcacatcattctgatcctcctggaacctatccccttttactgtattcctacccggtatcataaacttaaggccctgctcgagaagaaggcttacctggagtggcccaaagacagacgcaagtgcggcctgttctgggccaatcttcgggccgctatcaacgtgaatgtgctggcgacaagagaaatgtacgagctccaaaccttcacggaactgaacgaggaaagccgcgggtctacaattagcctcatgcggaccgattgtctgtga

SEQ ID NO: 9459 - protein, 811 aa, synthetic construct [sequence omitted]

SEQ ID NO: 9460 - RNA, 2436 nt, synthetic construct
  misc_feature 1..2436: note = TLR10__Homo_sapiens__AAY78482
  source 1..2436: mol_type = other RNA
atgagactcatcagaaacatttacatattttgtagtattgttatgacagcagagggtgatgctccagagctgccagaagaaagggaactgatgaccaactgctccaacatgtctctaagaaaggttcccgcagacttgaccccagccacaacgacactggatttatcctataacctcctttttcaactccagagttcagattttcattctgtctccaaactgagagttttgattctatgccataacagaattcaacagctggatctcaaaacctttgaattcaacaaggagttaagatatttagatttgtctaataacagactgaagagtgtaacttggtatttactggcaggtctcaggtatttagatctttcttttaatgactttgacaccatgcctatctgtgaggaagctggcaacatgtcacacctggaaatcctaggtttgagtggggcaaaaatacaaaaatcagatttccagaaaattgctcatctgcatctaaatactgtcttcttaggattcagaactcttcctcattatgaagaaggtagcctgcccatcttaaacacaacaaaactgcacattgttttaccaatggacacaaatttctgggttcttttgcgtgatggaatcaagacttcaaaaatattagaaatgacaaatatagatggcaaaagccaatttgtaagttatgaaatgcaacgaaatcttagtttagaacatgctaagacatcggttctattgcttaataaagttgatttactctgggacgaccttttccttatcttacaatttgtttggcatacatcagtggaacactttcagatccgaaatgtgacttttggtggtaaggcttatcttgaccacaattcatttgactactcaaatactgtaatgagaactataaaattggagcatgtacatttcagagtgttttacattcaacaggataaaatctatttgcttttgaccaaaatggacatagaaaacctgacaatatcaaatgcacaaatgccacacatgcttttccctaattatcctacgaaattccaatatttaaattttgccaataatatcttaacagacgagttgtttaaaagaactctccaactgcctcacttgaaaactctcattttgaatggcaataaactggagacactttctttagtaagttgctttgctaacaacacacccttggaacacttggatctgagtcaaaatctattacaacataaaaatgatgaaaattgctcatggccagaaactgtggtcaatatgaatctgtcatacaataaattgtctgattctgtcttcaggtgcttgcccaaaagtattcaaatacttgacctaaataataaccaaatccaaactgtacctaaagagactattcatctgatggccttacgagaactaaatattgcatttaattttctaactgatctccctggatgcagtcatttcagtagactttcagttctgaacattgaaatgaacttcattctcagcccatctctggattttgttcagagctgccaggaagttaaaactctaaatgcgggaagaaatccattccggtgtacctgtgaattaaaaaatttcattcagcttgaaacatattcagaggtcatgatggttggatggtcagattcatacacctgtgaataccctttaaacctaaggggaactaggttaaaagacgttcatctccacgaattatcttgcaacacagctctgttgattgtcaccattgtggttattatgctagttctggggttggctgtggccttctgctgtctccactttgatctgccctggtatctcaggatgctaggtcaatgcacacaaacatggcacagggttaggaaaacaacccaagaacaactcaagagaaatgtccgattccacgcatttatttcatacagtgaacatgattctctgtgggtgaagaatgaattgatccccaatctagagaaggaagatggttctatcttgatttgcctttatgaaagctactttgaccctggcaaaagcattagtgaaaatattgtaagcttcattgagaaaagctataagtccatctttgttttgtctcccaactttgtccagaatgagtggtgccattatgaattctactttgcccaccacaatctcttccatgaaaattctgatcacataattcttatcttactggaacccattccattctattgcattcccaccaggtatcataaactgaaagctctcctggaaaaaaaagcatacttggaatggcccaaggataggcgtaaatgtgggcttttctgggcaaaccttcgagctgctgttaatgttaatgtattagccaccagagaaatgtatgaactgcagacattcacagagttaaatgaagagtctcgaggttctacaatctctctgatgagaacagattgtctataa

SEQ ID NO: 9461 - RNA, 2436 nt, synthetic construct
  misc_feature 1..2436: note = derived and/or modified sequence opt1 fromTLR10__Homo_sapiens__AAY78482
  source 1..2436: mol_type = other RNA
atgcgcctgatccggaacatctacatcttctgcagcatcgtgatgaccgccgagggcgacgcccccgagctcccggaggagcgcgagctgatgaccaactgctccaacatgagcctgcggaaggtccccgcggacctcacgcccgccaccaccaccctggacctgtcctacaacctcctgttccagctgcagagctccgacttccacagcgtgtccaagctccgcgtgctgatcctgtgccacaaccggatccagcagctcgacctgaagacgttcgagttcaacaaggagctgcgctacctcgacctgagcaacaaccggctgaagtccgtcacctggtacctcctggccgggctgcgctacctcgacctgagcttcaacgacttcgacaccatgcccatctgcgaggaggccggcaacatgtcccacctggagatcctcgggctgagcggcgccaagatccagaagtccgacttccagaagatcgcgcacctccacctgaacaccgtgttcctggggttccggacgctgccgcactacgaggagggcagcctccccatcctgaacaccaccaagctgcacatcgtgctccccatggacaccaacttctgggtcctgctgcgcgacggcatcaagacgtccaagatcctcgagatgaccaacatcgacgggaagtcccagttcgtgagctacgagatgcagcggaacctgagcctggagcacgccaagacctccgtgctcctgctgaacaaggtcgacctcctgtgggacgacctgttcctcatcctgcagttcgtgtggcacaccagcgtggagcacttccagatccgcaacgtcacgttcggcgggaaggcctacctggaccacaacagcttcgactactccaacaccgtgatgcggaccatcaagctcgagcacgtgcacttccgcgtcttctacatccagcaggacaagatctacctgctgctgaccaagatggacatcgagaacctcacgatcagcaacgcccagatgccccacatgctgttcccgaactaccccaccaagttccagtacctgaacttcgcgaacaacatcctcaccgacgagctgttcaagcggaccctgcagctcccccacctgaagacgctgatcctcaacggcaacaagctggagaccctgtccctcgtgagctgcttcgccaacaacacgcccctggagcacctggacctctcccagaacctgctgcagcacaagaacgacgagaactgcagctggccggagaccgtggtcaacatgaacctctcctacaacaagctgagcgactccgtgttccgctgcctgcccaagagcatccagatcctcgacctgaacaacaaccagatccagaccgtgcccaaggagaccatccacctgatggccctccgggagctgaacatcgccttcaacttcctgaccgacctccccgggtgctcccacttcagccgcctgtccgtcctgaacatcgagatgaacttcatcctcagcccgtccctggacttcgtgcagagctgccaggaggtgaagaccctgaacgccggccggaaccccttccgctgcacgtgcgagctcaagaacttcatccagctggagacctactccgaggtcatgatggtgggctggagcgactcctacacgtgcgagtaccccctgaacctccgggggacccgcctgaaggacgtccacctccacgagctgagctgcaacaccgcgctgctgatcgtgaccatcgtggtcatcatgctcgtgctgggcctggccgtggccttctgctgcctccacttcgacctgccctggtacctgcgcatgctcgggcagtgcacccagacctggcaccgggtccgcaagaccacgcaggagcagctgaagcggaacgtgcgcttccacgccttcatcagctactccgagcacgacagcctgtgggtgaagaacgagctcatcccgaacctggagaaggaggacggctccatcctgatctgcctctacgagagctacttcgaccccggcaagtccatcagcgagaacatcgtctccttcatcgagaagtcctacaagagcatcttcgtgctgagccccaacttcgtgcagaacgagtggtgccactacgagttctacttcgcccaccacaacctgttccacgagaactccgaccacatcatcctcatcctgctggagcccatcccgttctactgcatccccacccggtaccacaagctcaaggcgctgctggagaagaaggcctacctcgagtggcccaaggaccgccggaagtgcgggctgttctgggccaacctgcgcgccgccgtcaacgtgaacgtgctcgcgacccgggagatgtacgagctgcagaccttcacggagctgaacgaggagagccgcggctccaccatcagcctcatgcggaccgactgcctgtga

SEQ ID NO: 9462 - RNA, 2436 nt, synthetic construct
  misc_feature 1..2436: note = derived and/or modified sequence opt2 fromTLR10__Homo_sapiens__AAY78482
  source 1..2436: mol_type = other RNA
atgcgcctcatccgcaacatctacatcttctgctccatcgtcatgaccgccgagggcgacgcccccgagctccccgaggagcgcgagctcatgaccaactgctccaacatgtccctccgcaaggtccccgccgacctcacccccgccaccaccaccctcgacctctcctacaacctcctcttccagctccagtcctccgacttccactccgtctccaagctccgcgtcctcatcctctgccacaaccgcatccagcagctcgacctcaagaccttcgagttcaacaaggagctccgctacctcgacctctccaacaaccgcctcaagtccgtcacctggtacctcctcgccggcctccgctacctcgacctctccttcaacgacttcgacaccatgcccatctgcgaggaggccggcaacatgtcccacctcgagatcctcggcctctccggcgccaagatccagaagtccgacttccagaagatcgcccacctccacctcaacaccgtcttcctcggcttccgcaccctcccccactacgaggagggctccctccccatcctcaacaccaccaagctccacatcgtcctccccatggacaccaacttctgggtcctcctccgcgacggcatcaagacctccaagatcctcgagatgaccaacatcgacggcaagtcccagttcgtctcctacgagatgcagcgcaacctctccctcgagcacgccaagacctccgtcctcctcctcaacaaggtcgacctcctctgggacgacctcttcctcatcctccagttcgtctggcacacctccgtcgagcacttccagatccgcaacgtcaccttcggcggcaaggcctacctcgaccacaactccttcgactactccaacaccgtcatgcgcaccatcaagctcgagcacgtccacttccgcgtcttctacatccagcaggacaagatctacctcctcctcaccaagatggacatcgagaacctcaccatctccaacgcccagatgccccacatgctcttccccaactaccccaccaagttccagtacctcaacttcgccaacaacatcctcaccgacgagctcttcaagcgcaccctccagctcccccacctcaagaccctcatcctcaacggcaacaagctcgagaccctctccctcgtctcctgcttcgccaacaacacccccctcgagcacctcgacctctcccagaacctcctccagcacaagaacgacgagaactgctcctggcccgagaccgtcgtcaacatgaacctctcctacaacaagctctccgactccgtcttccgctgcctccccaagtccatccagatcctcgacctcaacaacaaccagatccagaccgtccccaaggagaccatccacctcatggccctccgcgagctcaacatcgccttcaacttcctcaccgacctccccggctgctcccacttctcccgcctctccgtcctcaacatcgagatgaacttcatcctctccccctccctcgacttcgtccagtcctgccaggaggtcaagaccctcaacgccggccgcaaccccttccgctgcacctgcgagctcaagaacttcatccagctcgagacctactccgaggtcatgatggtcggctggtccgactcctacacctgcgagtaccccctcaacctccgcggcacccgcctcaaggacgtccacctccacgagctctcctgcaacaccgccctcctcatcgtcaccatcgtcgtcatcatgctcgtcctcggcctcgccgtcgccttctgctgcctccacttcgacctcccctggtacctccgcatgctcggccagtgcacccagacctggcaccgcgtccgcaagaccacccaggagcagctcaagcgcaacgtccgcttccacgccttcatctcctactccgagcacgactccctctgggtcaagaacgagctcatccccaacctcgagaaggaggacggctccatcctcatctgcctctacgagtcctacttcgaccccggcaagtccatctccgagaacatcgtctccttcatcgagaagtcctacaagtccatcttcgtcctctcccccaacttcgtccagaacgagtggtgccactacgagttctacttcgcccaccacaacctcttccacgagaactccgaccacatcatcctcatcctcctcgagcccatccccttctactgcatccccacccgctaccacaagctcaaggccctcctcgagaagaaggcctacctcgagtggcccaaggaccgccgcaagtgcggcctcttctgggccaacctccgcgccgccgtcaacgtcaacgtcctcgccacccgcgagatgtacgagctccagaccttcaccgagctcaacgaggagtcccgcggctccaccatctccctcatgcgcaccgactgcctctga

SEQ ID NO: 9463 - RNA, 2436 nt, synthetic construct
  misc_feature 1..2436: note = derived and/or modified sequence opt3 fromTLR10__Homo_sapiens__AAY78482
  source 1..2436: mol_type = other RNA
atgagactgatcaggaacatttacatattctgcagcatcgtgatgaccgccgagggcgacgctcccgaactccctgaggaacgggagcttatgacaaattgttccaacatgtctctgcgcaaggtcccagcagatttgactccggccacgaccacattagacctgtcatataatctactctttcagctgcaaagtagcgatttccactccgtttctaaacttcgagtgctgattttgtgccataaccgtatccagcagctcgacctgaagacttttgaatttaataaagagctgagatacctcgatttatcgaacaataggctgaagtcagtaacctggtatcttttggcggggctgcggtacctagacctcagcttcaacgatttcgacacaatgcccatttgtgaggaagctggaaatatgagtcacctggagatccttggtctgtccggcgccaaaatacagaagtctgattttcaaaagatcgcacatttgcacctcaacaccgtgttcctggggtttcgcactttacctcattatgaagagggaagcctgccaattctcaatacaaccaaacttcacatcgtcctgcccatggacacgaacttctgggtgttgctaagagatggcattaagacttccaaaatcctggagatgaccaatatagacggtaagtcacagtttgttagttacgaaatgcagaggaacctcagcctggagcacgccaaaacatctgtgcttctgttgaataaggtcgatctcctgtgggacgacttattcctgattctacagtttgtgtggcatacttccgtagaacacttccaaatccggaacgttaccttcgggggaaaggcttatctcgatcataactcatttgactacagcaatacagtgatgcgcaccattaaactggagcacgtccacttccgagtgttttacatccagcaggataagatctatcttttgctgacgaaaatggacattgaaaacctcactataagtaatgcacagatgcctcatatgctgttcccaaactaccccacaaagtttcaatatcttaatttcgccaacaatatcctgaccgatgagttgtttaaaagaactctccagctgcctcacttaaagacactgattctaaacggcaataaactcgagaccctgtctcttgtgtcctgcttcgctaacaatacgccattggaacatctggacctcagccagaacctgttacaacacaagaatgatgagaactgttcgtggccggaaaccgtcgttaatatgaacctgtcttacaacaaactttccgactcagtgtttaggtgcttgcccaagagtatccagatactcgatctgaataacaatcagattcagacagtacctaaggagactatccatctaatggccctgcgggaactcaacatcgcgttcaattttctgaccgaccttccaggctgtagccacttctcccgtttgtctgtgctgaacattgagatgaattttatcttaagcccctcactcgatttcgtccaaagttgccaggaggtgaaaacactgaacgcagggcgcaatcctttcagatgtacttgcgaacttaagaactttattcagctggagacctattccgaagttatgatggtgggatggagcgactcttacacatgtgagtatccattgaatctcaggggtacccggctgaaagacgtccacctacatgaactgtcatgcaacactgccctcctgatagtgacgatcgtagttattatgcttgtgttgggcctggctgtcgccttctgctgtttacactttgatctcccctggtacctgcgaatgcttgggcagtgcacacaaacctggcatcgcgtgagaaagactacccaggagcagctgaagaggaatgtccggttccacgcatttatcagttacagcgagcacgactccctatgggtgaaaaacgaactcatcccgaatctggagaaggaagatggatctattttgatatgtctgtatgagtcgtacttcgaccctggcaaaagcatctccgagaacattgtttcatttatcgaaaagagttataaatctattttcgtgttaagccccaactttgtacagaatgagtggtgccattacgagttctattttgctcaccataacctcttccacgaaaattccgatcatatcatactgatccttctggaaccaattcctttttactgtatccccacacgctatcacaagttgaaggccctcctggagaaaaaggcgtacctagagtggccaaaagacagaaggaagtgcggtctgttctgggccaaccttcgtgcagctgtcaatgtgaacgttctcgccacccgggaaatgtacgagctgcaaactttcacagaattgaatgaggaatcacgagggagcacgatttctctgatgagaaccgattgtttatga

SEQ ID NO: 9464 - RNA, 2436 nt, synthetic construct
  misc_feature 1..2436: note = derived and/or modified sequence opt4 fromTLR10__Homo_sapiens__AAY78482
  source 1..2436: mol_type = other RNA
atgagactgatcagaaacatctacatcttctgcagcatcgtgatgaccgccgagggcgacgcccccgagctgcccgaggagagagagctgatgaccaactgcagcaacatgagcctgagaaaggtgcccgccgacctgacccccgccaccaccaccctggacctgagctacaacctgctgttccagctgcagagcagcgacttccacagcgtgagcaagctgagagtgctgatcctgtgccacaacagaatccagcagctggacctgaagaccttcgagttcaacaaggagctgagatacctggacctgagcaacaacagactgaagagcgtgacctggtacctgctggccggcctgagatacctggacctgagcttcaacgacttcgacaccatgcccatctgcgaggaggccggcaacatgagccacctggagatcctgggcctgagcggcgccaagatccagaagagcgacttccagaagatcgcccacctgcacctgaacaccgtgttcctgggcttcagaaccctgccccactacgaggagggcagcctgcccatcctgaacaccaccaagctgcacatcgtgctgcccatggacaccaacttctgggtgctgctgagagacggcatcaagaccagcaagatcctggagatgaccaacatcgacggcaagagccagttcgtgagctacgagatgcagagaaacctgagcctggagcacgccaagaccagcgtgctgctgctgaacaaggtggacctgctgtgggacgacctgttcctgatcctgcagttcgtgtggcacaccagcgtggagcacttccagatcagaaacgtgaccttcggcggcaaggcctacctggaccacaacagcttcgactacagcaacaccgtgatgagaaccatcaagctggagcacgtgcacttcagagtgttctacatccagcaggacaagatctacctgctgctgaccaagatggacatcgagaacctgaccatcagcaacgcccagatgccccacatgctgttccccaactaccccaccaagttccagtacctgaacttcgccaacaacatcctgaccgacgagctgttcaagagaaccctgcagctgccccacctgaagaccctgatcctgaacggcaacaagctggagaccctgagcctggtgagctgcttcgccaacaacacccccctggagcacctggacctgagccagaacctgctgcagcacaagaacgacgagaactgcagctggcccgagaccgtggtgaacatgaacctgagctacaacaagctgagcgacagcgtgttcagatgcctgcccaagagcatccagatcctggacctgaacaacaaccagatccagaccgtgcccaaggagaccatccacctgatggccctgagagagctgaacatcgccttcaacttcctgaccgacctgcccggctgcagccacttcagcagactgagcgtgctgaacatcgagatgaacttcatcctgagccccagcctggacttcgtgcagagctgccaggaggtgaagaccctgaacgccggcagaaaccccttcagatgcacctgcgagctgaagaacttcatccagctggagacctacagcgaggtgatgatggtgggctggagcgacagctacacctgcgagtaccccctgaacctgagaggcaccagactgaaggacgtgcacctgcacgagctgagctgcaacaccgccctgctgatcgtgaccatcgtggtgatcatgctggtgctgggcctggccgtggccttctgctgcctgcacttcgacctgccctggtacctgagaatgctgggccagtgcacccagacctggcacagagtgagaaagaccacccaggagcagctgaagagaaacgtgagattccacgccttcatcagctacagcgagcacgacagcctgtgggtgaagaacgagctgatccccaacctggagaaggaggacggcagcatcctgatctgcctgtacgagagctacttcgaccccggcaagagcatcagcgagaacatcgtgagcttcatcgagaagagctacaagagcatcttcgtgctgagccccaacttcgtgcagaacgagtggtgccactacgagttctacttcgcccaccacaacctgttccacgagaacagcgaccacatcatcctgatcctgctggagcccatccccttctactgcatccccaccagataccacaagctgaaggccctgctggagaagaaggcctacctggagtggcccaaggacagaagaaagtgcggcctgttctgggccaacctgagagccgccgtgaacgtgaacgtgctggccaccagagagatgtacgagctgcagaccttcaccgagctgaacgaggagagcagaggcagcaccatcagcctgatgagaaccgactgcctgtga

SEQ ID NO: 9465 - RNA, 2436 nt, synthetic construct
  misc_feature 1..2436: note = derived and/or modified sequence opt5 fromTLR10__Homo_sapiens__AAY78482
  source 1..2436: mol_type = other RNA
atgagactgatccggaacatttacatcttctgcagcattgtgatgaccgccgagggcgacgctcccgaactccctgaggaacgcgagctgatgacaaattgttccaacatgtctcttagaaaggtcccggccgatctgacgcccgcgaccacaaccctcgacctgagctataatcttctgtttcagctccaatcctctgatttccacagcgtttccaaactgcgggtgctgatcctctgccataaccgcattcagcagctggaccttaagacatttgagttcaataaagagctgagatacctcgatctgtctaacaatcggcttaagagcgtgacctggtatctgctcgctgggctgcgctacctggacctctcctttaacgatttcgacacaatgcctatctgtgaggaagccggaaatatgagccacctggagatccttggcctgtctggggccaaaattcagaagtccgattttcaaaagatcgctcatctccacctgaacaccgtcttccttggatttagaacgctgccccattatgaagagggcagcctccctattctgaataccacaaaactgcacatcgtgctccccatggacaccaacttctgggttctgcttcgggatgggattaagacatctaaaatcctggagatgaccaatattgacggaaagtcccagtttgtgagctacgaaatgcagcgcaacctctctctggagcacgccaaaacgtccgtccttctgctcaataaggtggatctgctgtgggacgacctcttcctgatccttcagtttgtttggcatacaagcgtggaacacttccaaatcagaaacgtcaccttcggcggcaaggcttatctggatcataactcctttgactactctaatacagtgatgcggaccattaaactcgagcacgtgcacttccgcgtcttttacatccagcaggataagatttatctgctgcttaccaaaatggacatcgaaaacctcacaattagcaatgcccagatgcctcatatgctgttcccgaactaccccacgaagtttcaatatctgaatttcgcgaacaatatcctcaccgatgagctgtttaaaagaacacttcagctgcctcacctcaagaccctgatcctgaacgggaataaacttgagacactctccctggttagctgcttcgccaacaatacgcccctggaacatctcgacctgtctcagaaccttctgcaacacaagaatgatgagaactgttcctggcctgaaaccgtggtgaatatgaacctcagctacaacaagctgtctgacagcgtctttcggtgcctgcccaaatccattcagatccttgatctcaataacaatcagattcagacagtgccgaaggagaccatccatctgatggctctgcgcgaactcaacattgccttcaattttctgaccgaccttcctggatgttctcacttcagcagactgtccgttctcaacatcgagatgaattttatcctgagcccctctctggatttcgtgcaatcctgccaggaggtcaaaacacttaacgctggccggaatcctttcagatgtacctgcgaactcaagaactttattcagctggagacatatagcgaagtgatgatggttgggtggtctgactcctacacgtgtgagtatcccctgaatctccgcggaacccggctgaaagacgtgcaccttcatgaactgagctgcaacacagccctcctgatcgtcaccattgtggtcatcatgctggtgcttggcctggcggttgccttctgctgtctccactttgatctgccctggtacctcagaatgctggggcagtgcacacaaacctggcatcgcgtgcggaagacgacccaggagcagcttaagagaaatgtccgcttccacgcttttatttcctactctgagcacgacagcctgtgggtgaaaaacgaactcatccctaatctggagaaggaagatggatccattctgatctgtctttatgagtcttacttcgacccgggcaaaagcatctccgagaacattgttagctttatcgaaaagtcttataaatccattttcgtgctgagccccaactttgtccagaatgagtggtgccattacgagttctattttgcccaccataacctcttccacgaaaattctgatcatatcattctgatcctcctggaacctatccccttttactgtattcctacacggtatcacaaacttaaggctctgctcgaaaagaaggcctacctggagtggcccaaagacagacgcaagtgcggcctgttctgggccaaccttcgggctgcggtgaatgtgaacgttctggccaccagagaaatgtacgagctccaaacattcaccgaactgaatgaggaatcccgcgggagcacgatctctctcatgcggacagattgtctgtga

SEQ ID NO: 9466 - protein, 811 aa, synthetic construct [sequence omitted]

SEQ ID NO: 9467 - RNA, 2436 nt, synthetic construct
  misc_feature 1..2436: note = TLR10__Homo_sapiens__AAY78484
  source 1..2436: mol_type = other RNA
atgagactcatcagaaacatttacatattttgtagtattgttatgacagcagagggtgatgctccagagctgccagaagaaagggaactgatgaccaactgctccaacatgtctctaagaaaggttcccgcagacttgaccccagccacaacgacactggatttatcctataacctcctttttcaactccagagttcagattttcattctgtctccaaactgagagttttgattctatgccataacagaattcaacagctggatctcaaaacctttgaattcaacaaggagttaagatatttagatttgtctaataacagactgaagagtgtaacttggtatttactggcaggtctcaggtatttagatctttcttttaatgactttgacaccatgcctatctgtgaggaagctggcaacatgtcacacctggaaatcctaggtttgagtggggcaaaaatacaaaaatcagatttccagaaaattgctcatctgcatctaaatactgtcttcttaggattcagaactcttcctcattatgaagaaggtagcctgcccatcttaaacacaacaaaactgcacattgttttaccaatggacacaaatttctgggttcttttgcgtgatggaatcaagacttcaaaaatattagaaatgacaaatatagatggcaaaagccaatttgtaagttatgaaatgcaacgaaatcttagtttagaacatgctaagacatcggttctattgcttaataaagttgatttactctgggacgaccttttccttatcttacaatttgtttggcatacatcagtggaacactttcagatccgaaatgtgacttttggtggtaaggcttatcttgaccacaattcatttgactactcaaatactgtaatgagaactataaaattggagcatgtacatttcagagtgttttacattcaacaggataaaatctatttgcttttgaccaaaatggacatagaaaacctgacaatatcaaatgcacaaatgccacacatgcttttccctaattatcctacgaaattccaatatttaaattttgccaataatatcttaacagacgagttgtttaaaagaactctccaactgcctcacttgaaaactctcattttgaatggcaataaactggagacactttctttagtaagttgctttgctaacaacacacccttggaacacttggatctgagtcaaaatctattacaacataaaaatgatgaaaattgctcatggccagaaactgtggtcaatatgaatctgtcatacaataaattgtctgattctgtcttcaggtgcttgcccaaaagtattcaaatacttgacctaaataataaccaaatccaaactgtacctaaagagactattcatctgatggccttacgagaactaaatactgcatttaattttctaactgatctccctggatgcagtcatttcagtagactttcagttctgaacattgaaatgaacttcattctcagcccatctctggattttgttcagagctgccaggaagttaaaactctaaatgcgggaagaaatccattccggtgtacctgtgaattaaaaaatttcattcagcttgaaacatattcagaggtcatgatggttggatggtcagattcatacacctgtgaataccctttaaacctaaggggaactaggttaaaagacgttcatctccacgaattatcttgcaacacagctctgttgattgtcaccattgtggttattatgctagttctggggttggctgtggccttctgctgtctccactttgatctgccctggtatctcaggatgctaggtcaatgcacacaaacatggcacagggttaggaaaacaacccaagaacaactcaagagaaatgtccgattccacgcatttatttcatacagtgaacatgattctctgtgggtgaagaatgaattgatccccaatctagagaaggaagatggttctatcttgatttgcctttatgaaagctactttgaccctggcaaaagcattagtgaaaatattgtaagcttcattgagaaaagctataagtccatctttgttttgtctcccaactttgtccagaatgagtggtgccattatgaattctactttgcccaccacaatctcttccatgaaaattctgatcacataattcttatcttactggaacccattccattctattgcattcccaccaggtatcataaactgaaagctctcctggaaaaaaaagcatacttggaatggcccaaggataggcgtaaatgtgggcttttctgggcaaaccttcgagctgctgttaatgttaatgtattagccaccagagaaatgtatgaactgcagacattcacagagttaaatgaagagtctcgaggttctacaatctctctgatgagaacagactgtctataa

SEQ ID NO: 9468 - RNA, 2436 nt, synthetic construct
  misc_feature 1..2436: note = derived and/or modified sequence opt1 fromTLR10__Homo_sapiens__AAY78484
  source 1..2436: mol_type = other RNA
atgcgcctgatccggaacatctacatcttctgcagcatcgtgatgaccgccgagggcgacgcccccgagctcccggaggagcgcgagctgatgaccaactgctccaacatgagcctgcggaaggtccccgcggacctcacgcccgccaccaccaccctggacctgtcctacaacctcctgttccagctgcagagctccgacttccacagcgtgtccaagctccgcgtgctgatcctgtgccacaaccggatccagcagctcgacctgaagacgttcgagttcaacaaggagctgcgctacctcgacctgagcaacaaccggctgaagtccgtcacctggtacctcctggccgggctgcgctacctcgacctgagcttcaacgacttcgacaccatgcccatctgcgaggaggccggcaacatgtcccacctggagatcctcgggctgagcggcgccaagatccagaagtccgacttccagaagatcgcgcacctccacctgaacaccgtgttcctggggttccggacgctgccgcactacgaggagggcagcctccccatcctgaacaccaccaagctgcacatcgtgctccccatggacaccaacttctgggtcctgctgcgcgacggcatcaagacgtccaagatcctcgagatgaccaacatcgacgggaagtcccagttcgtgagctacgagatgcagcggaacctgagcctggagcacgccaagacctccgtgctcctgctgaacaaggtcgacctcctgtgggacgacctgttcctcatcctgcagttcgtgtggcacaccagcgtggagcacttccagatccgcaacgtcacgttcggcgggaaggcctacctggaccacaacagcttcgactactccaacaccgtgatgcggaccatcaagctcgagcacgtgcacttccgcgtcttctacatccagcaggacaagatctacctgctgctgaccaagatggacatcgagaacctcacgatcagcaacgcccagatgccccacatgctgttcccgaactaccccaccaagttccagtacctgaacttcgcgaacaacatcctcaccgacgagctgttcaagcggaccctgcagctcccccacctgaagacgctgatcctcaacggcaacaagctggagaccctgtccctcgtgagctgcttcgccaacaacacgcccctggagcacctggacctctcccagaacctgctgcagcacaagaacgacgagaactgcagctggccggagaccgtggtcaacatgaacctctcctacaacaagctgagcgactccgtgttccgctgcctgcccaagagcatccagatcctcgacctgaacaacaaccagatccagaccgtgcccaaggagaccatccacctgatggccctccgggagctgaacaccgccttcaacttcctgaccgacctccccgggtgctcccacttcagccgcctgtccgtcctgaacatcgagatgaacttcatcctcagcccgtccctggacttcgtgcagagctgccaggaggtgaagacgctgaacgccggccggaaccccttccgctgcacgtgcgagctcaagaacttcatccagctggagacctactccgaggtcatgatggtgggctggagcgactcctacacgtgcgagtaccccctgaacctccgggggacccgcctgaaggacgtccacctccacgagctgagctgcaacaccgcgctgctgatcgtgaccatcgtggtcatcatgctcgtgctgggcctggccgtggccttctgctgcctccacttcgacctgccctggtacctgcgcatgctcgggcagtgcacccagacctggcaccgggtccgcaagaccacccaggagcagctgaagcggaacgtgcgcttccacgccttcatcagctactccgagcacgacagcctgtgggtgaagaacgagctcatcccgaacctggagaaggaggacggctccatcctgatctgcctctacgagagctacttcgaccccggcaagtccatcagcgagaacatcgtctccttcatcgagaagtcctacaagagcatcttcgtgctgagccccaacttcgtgcagaacgagtggtgccactacgagttctacttcgcccaccacaacctgttccacgagaactccgaccacatcatcctcatcctgctggagcccatcccgttctactgcatccccacccggtaccacaagctcaaggcgctgctggagaagaaggcctacctcgagtggcccaaggaccgccggaagtgcgggctgttctgggccaacctgcgcgccgccgtcaacgtgaacgtgctcgcgacccgggagatgtacgagctgcagacgttcaccgagctgaacgaggagagccgcggctccaccatcagcctcatgcggaccgactgcctgtga

SEQ ID NO: 9469 - RNA, 2436 nt, synthetic construct
  misc_feature 1..2436: note = derived and/or modified sequence opt2 fromTLR10__Homo_sapiens__AAY78484
  source 1..2436: mol_type = other RNA
atgcgcctcatccgcaacatctacatcttctgctccatcgtcatgaccgccgagggcgacgcccccgagctccccgaggagcgcgagctcatgaccaactgctccaacatgtccctccgcaaggtccccgccgacctcacccccgccaccaccaccctcgacctctcctacaacctcctcttccagctccagtcctccgacttccactccgtctccaagctccgcgtcctcatcctctgccacaaccgcatccagcagctcgacctcaagaccttcgagttcaacaaggagctccgctacctcgacctctccaacaaccgcctcaagtccgtcacctggtacctcctcgccggcctccgctacctcgacctctccttcaacgacttcgacaccatgcccatctgcgaggaggccggcaacatgtcccacctcgagatcctcggcctctccggcgccaagatccagaagtccgacttccagaagatcgcccacctccacctcaacaccgtcttcctcggcttccgcaccctcccccactacgaggagggctccctccccatcctcaacaccaccaagctccacatcgtcctccccatggacaccaacttctgggtcctcctccgcgacggcatcaagacctccaagatcctcgagatgaccaacatcgacggcaagtcccagttcgtctcctacgagatgcagcgcaacctctccctcgagcacgccaagacctccgtcctcctcctcaacaaggtcgacctcctctgggacgacctcttcctcatcctccagttcgtctggcacacctccgtcgagcacttccagatccgcaacgtcaccttcggcggcaaggcctacctcgaccacaactccttcgactactccaacaccgtcatgcgcaccatcaagctcgagcacgtccacttccgcgtcttctacatccagcaggacaagatctacctcctcctcaccaagatggacatcgagaacctcaccatctccaacgcccagatgccccacatgctcttccccaactaccccaccaagttccagtacctcaacttcgccaacaacatcctcaccgacgagctcttcaagcgcaccctccagctcccccacctcaagaccctcatcctcaacggcaacaagctcgagaccctctccctcgtctcctgcttcgccaacaacacccccctcgagcacctcgacctctcccagaacctcctccagcacaagaacgacgagaactgctcctggcccgagaccgtcgtcaacatgaacctctcctacaacaagctctccgactccgtcttccgctgcctccccaagtccatccagatcctcgacctcaacaacaaccagatccagaccgtccccaaggagaccatccacctcatggccctccgcgagctcaacaccgccttcaacttcctcaccgacctccccggctgctcccacttctcccgcctctccgtcctcaacatcgagatgaacttcatcctctccccctccctcgacttcgtccagtcctgccaggaggtcaagaccctcaacgccggccgcaaccccttccgctgcacctgcgagctcaagaacttcatccagctcgagacctactccgaggtcatgatggtcggctggtccgactcctacacctgcgagtaccccctcaacctccgcggcacccgcctcaaggacgtccacctccacgagctctcctgcaacaccgccctcctcatcgtcaccatcgtcgtcatcatgctcgtcctcggcctcgccgtcgccttctgctgcctccacttcgacctcccctggtacctccgcatgctcggccagtgcacccagacctggcaccgcgtccgcaagaccacccaggagcagctcaagcgcaacgtccgcttccacgccttcatctcctactccgagcacgactccctctgggtcaagaacgagctcatccccaacctcgagaaggaggacggctccatcctcatctgcctctacgagtcctacttcgaccccggcaagtccatctccgagaacatcgtctccttcatcgagaagtcctacaagtccatcttcgtcctctcccccaacttcgtccagaacgagtggtgccactacgagttctacttcgcccaccacaacctcttccacgagaactccgaccacatcatcctcatcctcctcgagcccatccccttctactgcatccccacccgctaccacaagctcaaggccctcctcgagaagaaggcctacctcgagtggcccaaggaccgccgcaagtgcggcctcttctgggccaacctccgcgccgccgtcaacgtcaacgtcctcgccacccgcgagatgtacgagctccagaccttcaccgagctcaacgaggagtcccgcggctccaccatctccctcatgcgcaccgactgcctctga

SEQ ID NO: 9470 - RNA, 2436 nt, synthetic construct
  misc_feature 1..2436: note = derived and/or modified sequence opt3 fromTLR10__Homo_sapiens__AAY78484
  source 1..2436: mol_type = other RNA
atgagactgatcaggaacatttacatattctgcagcatcgtgatgaccgccgagggcgacgctcccgaactccctgaggaacgggagcttatgacaaattgttccaacatgtctctgcgcaaggtcccagcagatttgactccggccacgaccacattagacctgtcatataatctactctttcagctgcaaagtagcgatttccactccgtttctaaacttcgagtgctgattttgtgccataaccgtatccagcagctcgacctgaagacttttgaatttaataaagagctgagatacctcgatttatcgaacaataggctgaagtcagtaacctggtatcttttggcggggctgcggtacctagacctcagcttcaacgatttcgacacaatgcccatttgtgaggaagctggaaatatgagtcacctggagatccttggtctgtccggcgccaaaatacagaagtctgattttcaaaagatcgcacatttgcacctcaacaccgtgttcctggggtttcgcactttacctcattatgaagagggaagcctgccaattctcaatacaaccaaacttcacatcgtcctgcccatggacacgaacttctgggtgttgctaagagatggcattaagacttccaaaatcctggagatgaccaatatagacggtaagtcacagtttgttagttacgaaatgcagaggaacctcagcctggagcacgccaaaacatctgtgcttctgttgaataaggtcgatctcctgtgggacgacttattcctgattctacagtttgtgtggcatacttccgtagaacacttccaaatccggaacgttaccttcgggggaaaggcttatctcgatcataactcatttgactacagcaatacagtgatgcgcaccattaaactggagcacgtccacttccgagtgttttacatccagcaggataagatctatcttttgctgacgaaaatggacattgaaaacctcactataagtaatgcacagatgcctcatatgctgttcccaaactaccccacaaagtttcaatatcttaatttcgccaacaatatcctgaccgatgagttgtttaaaagaactctccagctgcctcacttaaagacactgattctaaacggcaataaactcgagaccctgtctcttgtgtcctgcttcgctaacaatacgccattggaacatctggacctcagccagaacctgttacaacacaagaatgatgagaactgttcgtggccggaaaccgtcgttaatatgaacctgtcttacaacaaactttccgactcagtgtttaggtgcttgcccaagagtatccagatactcgatctgaataacaatcagattcagacagtacctaaggagactatccatctaatggccctgcgggaactcaacaccgcgttcaattttctgacagaccttccaggctgtagccacttctcccgtttgtctgtgctgaacatcgagatgaattttattttaagcccctcactcgatttcgtccaaagttgccaggaggtgaaaactctgaacgcagggcgcaatcctttcagatgtacctgcgaacttaagaactttatccagctggagacatattccgaagttatgatggtgggatggagcgactcttacacctgtgagtatccattgaatctcaggggtactcggctgaaagacgtccacctacatgaactgtcatgcaacacggccctcctgattgtgacaatagtagttatcatgcttgtgttgggcctggctgtcgccttctgctgtttacactttgatctcccctggtacctgcgaatgcttgggcagtgcacccaaacttggcatcgcgtgagaaagaccacacaggagcagctgaagaggaatgtccggttccacgcatttattagttacagcgagcacgactccctatgggtgaaaaacgaactcatcccgaatctggagaaggaagatggatctatcttgatttgtctgtatgagtcgtacttcgaccctggcaaaagcatatccgagaacatcgtttcatttattgaaaagagttataaatctatcttcgtgttaagccccaactttgtacagaatgagtggtgccattacgagttctattttgctcaccataacctcttccacgaaaattccgatcatattatcctgatacttctggaaccaatccctttttactgtattcccacccgctatcacaagttgaaggccctcctggagaaaaaggcgtacctagagtggccaaaagacagaaggaagtgcggtctgttctgggccaaccttcgtgcagctgtcaatgtgaacgttctcgccactcgggaaatgtacgagctgcaaacattcacggaattgaatgaggaatcacgagggagcaccatctctctgatgagaactgattgtttatga

SEQ ID NO: 9471 - RNA, 2436 nt, synthetic construct
  misc_feature 1..2436: note = derived and/or modified sequence opt4 fromTLR10__Homo_sapiens__AAY78484
  source 1..2436: mol_type = other RNA
atgagactgatcagaaacatctacatcttctgcagcatcgtgatgaccgccgagggcgacgcccccgagctgcccgaggagagagagctgatgaccaactgcagcaacatgagcctgagaaaggtgcccgccgacctgacccccgccaccaccaccctggacctgagctacaacctgctgttccagctgcagagcagcgacttccacagcgtgagcaagctgagagtgctgatcctgtgccacaacagaatccagcagctggacctgaagaccttcgagttcaacaaggagctgagatacctggacctgagcaacaacagactgaagagcgtgacctggtacctgctggccggcctgagatacctggacctgagcttcaacgacttcgacaccatgcccatctgcgaggaggccggcaacatgagccacctggagatcctgggcctgagcggcgccaagatccagaagagcgacttccagaagatcgcccacctgcacctgaacaccgtgttcctgggcttcagaaccctgccccactacgaggagggcagcctgcccatcctgaacaccaccaagctgcacatcgtgctgcccatggacaccaacttctgggtgctgctgagagacggcatcaagaccagcaagatcctggagatgaccaacatcgacggcaagagccagttcgtgagctacgagatgcagagaaacctgagcctggagcacgccaagaccagcgtgctgctgctgaacaaggtggacctgctgtgggacgacctgttcctgatcctgcagttcgtgtggcacaccagcgtggagcacttccagatcagaaacgtgaccttcggcggcaaggcctacctggaccacaacagcttcgactacagcaacaccgtgatgagaaccatcaagctggagcacgtgcacttcagagtgttctacatccagcaggacaagatctacctgctgctgaccaagatggacatcgagaacctgaccatcagcaacgcccagatgccccacatgctgttccccaactaccccaccaagttccagtacctgaacttcgccaacaacatcctgaccgacgagctgttcaagagaaccctgcagctgccccacctgaagaccctgatcctgaacggcaacaagctggagaccctgagcctggtgagctgcttcgccaacaacacccccctggagcacctggacctgagccagaacctgctgcagcacaagaacgacgagaactgcagctggcccgagaccgtggtgaacatgaacctgagctacaacaagctgagcgacagcgtgttcagatgcctgcccaagagcatccagatcctggacctgaacaacaaccagatccagaccgtgcccaaggagaccatccacctgatggccctgagagagctgaacaccgccttcaacttcctgaccgacctgcccggctgcagccacttcagcagactgagcgtgctgaacatcgagatgaacttcatcctgagccccagcctggacttcgtgcagagctgccaggaggtgaagaccctgaacgccggcagaaaccccttcagatgcacctgcgagctgaagaacttcatccagctggagacctacagcgaggtgatgatggtgggctggagcgacagctacacctgcgagtaccccctgaacctgagaggcaccagactgaaggacgtgcacctgcacgagctgagctgcaacaccgccctgctgatcgtgaccatcgtggtgatcatgctggtgctgggcctggccgtggccttctgctgcctgcacttcgacctgccctggtacctgagaatgctgggccagtgcacccagacctggcacagagtgagaaagaccacccaggagcagctgaagagaaacgtgagattccacgccttcatcagctacagcgagcacgacagcctgtgggtgaagaacgagctgatccccaacctggagaaggaggacggcagcatcctgatctgcctgtacgagagctacttcgaccccggcaagagcatcagcgagaacatcgtgagcttcatcgagaagagctacaagagcatcttcgtgctgagccccaacttcgtgcagaacgagtggtgccactacgagttctacttcgcccaccacaacctgttccacgagaacagcgaccacatcatcctgatcctgctggagcccatccccttctactgcatccccaccagataccacaagctgaaggccctgctggagaagaaggcctacctggagtggcccaaggacagaagaaagtgcggcctgttctgggccaacctgagagccgccgtgaacgtgaacgtgctggccaccagagagatgtacgagctgcagaccttcaccgagctgaacgaggagagcagaggcagcaccatcagcctgatgagaaccgactgcctgtga

SEQ ID NO: 9472 - RNA, 2436 nt, synthetic construct
  misc_feature 1..2436: note = derived and/or modified sequence opt5 fromTLR10__Homo_sapiens__AAY78484
  source 1..2436: mol_type = other RNA
atgagactgatccggaacatttacatcttctgcagcattgtgatgaccgccgagggcgacgctcccgaactccctgaggaacgcgagctgatgacaaattgttccaacatgtctcttagaaaggtcccggccgatctgacgcccgcgaccacaaccctcgacctgagctataatcttctgtttcagctccaatcctctgatttccacagcgtttccaaactgcgggtgctgatcctctgccataaccgcattcagcagctggaccttaagacatttgagttcaataaagagctgagatacctcgatctgtctaacaatcggcttaagagcgtgacctggtatctgctcgctgggctgcgctacctggacctctcctttaacgatttcgacacaatgcctatctgtgaggaagccggaaatatgagccacctggagatccttggcctgtctggggccaaaattcagaagtccgattttcaaaagatcgctcatctccacctgaacaccgtcttccttggatttagaacgctgccccattatgaagagggcagcctccctattctgaataccacaaaactgcacatcgtgctccccatggacaccaacttctgggttctgcttcgggatgggattaagacatctaaaatcctggagatgaccaatattgacggaaagtcccagtttgtgagctacgaaatgcagcgcaacctctctctggagcacgccaaaacgtccgtccttctgctcaataaggtggatctgctgtgggacgacctcttcctgatccttcagtttgtttggcatacaagcgtggaacacttccaaatcagaaacgtcaccttcggcggcaaggcttatctggatcataactcctttgactactctaatacagtgatgcggaccattaaactcgagcacgtgcacttccgcgtcttttacatccagcaggataagatttatctgctgcttaccaaaatggacatcgaaaacctcacaattagcaatgcccagatgcctcatatgctgttcccgaactaccccacgaagtttcaatatctgaatttcgcgaacaatatcctcaccgatgagctgtttaaaagaacacttcagctgcctcacctcaagaccctgatcctgaacgggaataaacttgagacactctccctggttagctgcttcgccaacaatacgcccctggaacatctcgacctgtctcagaaccttctgcaacacaagaatgatgagaactgttcctggcctgaaaccgtggtgaatatgaacctcagctacaacaagctgtctgacagcgtctttcggtgcctgcccaaatccattcagatccttgatctcaataacaatcagattcagacagtgccgaaggagaccatccatctgatggctctgcgcgaactcaacaccgccttcaattttctgacagaccttcctggatgttctcacttcagcagactgtccgttctcaacattgagatgaattttatcctgagcccctctctggatttcgtgcaatcctgccaggaggtcaaaacccttaacgctggccggaatcctttcagatgtacatgcgaactcaagaactttatccagctggagacgtatagcgaagtgatgatggttgggtggtctgactcctacacctgtgagtatcccctgaatctccgcggaacacggctgaaagacgtgcaccttcatgaactgagctgcaacaccgccctcctgattgtcacaatcgtggtcattatgctggtgcttggcctggcggttgccttctgctgtctccactttgatctgccctggtacctcagaatgctggggcagtgcacccaaacgtggcatcgcgtgcggaagaccacacaggagcagcttaagagaaatgtccgcttccacgcttttatctcctactctgagcacgacagcctgtgggtgaaaaacgaactcattcctaatctggagaaggaagatggatccatcctgatttgtctttatgagtcttacttcgacccgggcaaaagcatctccgagaacatcgttagctttattgaaaagtcttataaatccatcttcgtgctgagccccaactttgtccagaatgagtggtgccattacgagttctattttgcccaccataacctcttccacgaaaattctgatcatattatcctgattctcctggaacctatccccttttactgtatccctacccggtatcacaaacttaaggctctgctcgaaaagaaggcctacctggagtggcccaaagacagacgcaagtgcggcctgttctgggccaaccttcgggctgcggtgaatgtgaacgttctggccacaagagaaatgtacgagctccaaaccttcacggaactgaatgaggaatcccgcgggagcacaatttctctcatgcggaccgattgtctgtga

SEQ ID NO: 9473 - protein, 811 aa, synthetic construct [sequence omitted]

SEQ ID NO: 9474 - RNA, 2436 nt, synthetic construct
  misc_feature 1..2436: note = TLR10__Homo_sapiens__AAY78485
  source 1..2436: mol_type = other RNA
atgagactcatcagaaacatttacatattttgtagtattgttatgacagcagagggtgatgctccagagctgccagaagaaagggaactgatgaccaactgctccaacatgtctctaagaaaggttcccgcagacttgaccccagccacaacgacactggatttatcctataacatcctttttcaactccagagttcagattttcattctgtctccaaactgagagttttgattctatgccataacagaattcaacagctggatctcaaaacctttgaattcaacaaggagttaagatatttagatttgtctaataacagactgaagagtgtaacttggtatttactggcaggtctcaggtatttagatctttcttttaatgactttgacaccatgcctatctgtgaggaagctggcaacatgtcacacctggaaatcctaggtttgagtggggcaaaaatacaaaaatcagatttccagaaaattgctcatctgcatctaaatactgtcttcttaggattcagaactcttcctcattatgaagaaggtagcctgcccatcttaaacacaacaaaactgcacattgttttaccaatggacacaaatttctgggttcttttgcgtgatggaatcaagacttcaaaaatattagaaatgacaaatatagatggcaaaagccaatttgtaagttatgaaatgcaacgaaatcttagtttagaaaatgctaagacatcggttctattgcttaataaagttgatttactctgggacgaccttttccttatcttacaatttgtttggcatacatcagtggaacactttcagatccgaaatgtgacttttggtggtaaggcttatcttgaccacaattcatttgactactcaaatactgtaatgagaactataaaattggagcatgtacatttcagagtgttttacattcaacaggataaaatctatttgcttttgaccaaaatggacatagaaaacctgacaatatcaaatgcacaaatgccacacatgcttttcccgaattatcctacgaaattccaatatttaaattttgccaataatatcttaacagacgagttgtttaaaagaactatccaactgcctcacttgaaaactctcattttgaatggcaataaactggagacactttctttagtaagttgctttgctaacaacacacccttggaacacttggatctgagtcaaaatctattacaacataaaaatgatgaaaattgctcatggccagaaactgtggtcaatatgaatctgtcatacaataaattgtctgattctgtcttcaggtgcttgcccaaaagtattcaaatacttgacctaaataataaccaaatccaaactgtacctaaagagactattcatctgatggccttacgagaactaaatattgcatttaattttctaactgatctccctggatgcagtcatttcagtagactttcagttctgaacattgaaatgaacttcattctcagcccatctctggattttgttcagagctgccaggaagttaaaactctaaatgcgggaagaaatccattccggtgtacctgtgaattaaaaaatttcattcagcttgaaacatattcagaggtcatgatggttggatggtcagattcatacacctgtgaataccctttaaacctaaggggaactaggttaaaagacgttcatctccacgaattatcttgcaacacagctctgttgattgtcaccattgtggttattatgctagttctggggttggctgtggccttctgctgtctccactttgatctgccctggtatctcaggatgctaggtcaatgcacacaaacatggcacagggttaggaaaacaacccaagaacaactcaagagaaatgtccgattccacgcatttatttcatacagtgaacatgattctctgtgggtgaagaatgaattgatccccaatctagagaaggaagatggttctatcttgatttgcctttatgaaagctactttgaccctggcaaaagcattagtgaaaatattgtaagcttcattgagaaaagctataagtccatctttgttttgtctcccaactttgtccagaatgagtggtgccattatgaattctactttgcccaccacaatctcttccatgaaaattctgatcatataattcttatcttactggaacccattccattctattgcattcccaccaggtatcataaactgaaagctctcctggaaaaaaaagcatacttggaatggcccaaggataggcgtaaatgtgggcttttctgggcaaaccttcgagctgctattaatgttaatgtattagccaccagagaaatgtatgaactgcagacattcacagagttaaatgaagagtctcgaggttctacaatctctctgatgagaacagattgtctataa

SEQ ID NO: 9475 - RNA, 2436 nt, synthetic construct
  misc_feature 1..2436: note = derived and/or modified sequence opt1 fromTLR10__Homo_sapiens__AAY78485
  source 1..2436: mol_type = other RNA
atgcgcctgatccggaacatctacatcttctgcagcatcgtgatgaccgccgagggcgacgcccccgagctcccggaggagcgcgagctgatgaccaactgctccaacatgagcctgcggaaggtccccgcggacctcacgcccgccaccaccaccctggacctgtcctacaacatcctcttccagctgcagagctccgacttccacagcgtgtccaagctgcgcgtgctcatcctgtgccacaaccggatccagcagctggacctcaagacgttcgagttcaacaaggagctgcgctacctggacctcagcaacaaccggctgaagtccgtcacctggtacctgctcgccgggctgcgctacctggacctcagcttcaacgacttcgacaccatgcccatctgcgaggaggccggcaacatgtcccacctggagatcctggggctcagcggcgccaagatccagaagtccgacttccagaagatcgcgcacctccacctgaacaccgtgttcctcgggttccggacgctgccgcactacgaggagggcagcctgcccatcctcaacaccaccaagctgcacatcgtgctgcccatggacaccaacttctgggtcctcctgcgcgacggcatcaagacgtccaagatcctggagatgaccaacatcgacgggaagtcccagttcgtgagctacgagatgcagcggaacctcagcctggagaacgccaagacctccgtgctgctcctgaacaaggtcgacctgctctgggacgacctgttcctgatcctccagttcgtgtggcacaccagcgtggagcacttccagatccgcaacgtcacgttcggcgggaaggcctacctggaccacaacagcttcgactactccaacaccgtgatgcggaccatcaagctggagcacgtgcacttccgcgtcttctacatccagcaggacaagatctacctcctgctgaccaagatggacatcgagaacctgacgatcagcaacgcccagatgccccacatgctgttcccgaactaccccaccaagttccagtacctgaacttcgcgaacaacatcctgaccgacgagctgttcaagcggaccatccagctcccccacctgaagacgctcatcctgaacggcaacaagctggagaccctctccctggtgagctgcttcgccaacaacacgcccctggagcacctcgacctgtcccagaacctgctccagcacaagaacgacgagaactgcagctggccggagaccgtggtcaacatgaacctgtcctacaacaagctgagcgactccgtgttccgctgcctccccaagagcatccagatcctggacctgaacaacaaccagatccagaccgtgcccaaggagaccatccacctcatggccctgcgggagctgaacatcgccttcaacttcctcaccgacctgcccgggtgctcccacttcagccgcctgtccgtcctcaacatcgagatgaacttcatcctgagcccgtccctggacttcgtgcagagctgccaggaggtgaagaccctcaacgccggccggaaccccttccgctgcacgtgcgagctgaagaacttcatccagctggagacctactccgaggtcatgatggtgggctggagcgactcctacacgtgcgagtaccccctcaacctgcgggggacccgcctgaaggacgtccacctccacgagctgagctgcaacaccgcgctgctcatcgtgaccatcgtggtcatcatgctggtgctgggcctcgccgtggccttctgctgcctgcacttcgacctgccctggtacctccgcatgctggggcagtgcacccagacctggcaccgggtccgcaagaccacgcaggagcagctgaagcggaacgtgcgcttccacgccttcatcagctactccgagcacgacagcctctgggtgaagaacgagctgatcccgaacctggagaaggaggacggctccatcctcatctgcctgtacgagagctacttcgaccccggcaagtccatcagcgagaacatcgtctccttcatcgagaagtcctacaagagcatcttcgtgctgagccccaacttcgtgcagaacgagtggtgccactacgagttctacttcgcccaccacaacctcttccacgagaactccgaccacatcatcctgatcctgctcgagcccatcccgttctactgcatccccacccggtaccacaagctgaaggcgctgctcgagaagaaggcctacctggagtggcccaaggaccgccggaagtgcgggctgttctgggccaacctccgcgccgccatcaacgtcaacgtgctggcgacccgggagatgtacgagctgcagaccttcacggagctcaacgaggagagccgcggctccaccatcagcctgatgcggaccgactgcctgtga

SEQ ID NO: 9476 - RNA, 2436 nt, synthetic construct
  misc_feature 1..2436: note = derived and/or modified sequence opt2 fromTLR10__Homo_sapiens__AAY78485
  source 1..2436: mol_type = other RNA
atgcgcctcatccgcaacatctacatcttctgctccatcgtcatgaccgccgagggcgacgcccccgagctccccgaggagcgcgagctcatgaccaactgctccaacatgtccctccgcaaggtccccgccgacctcacccccgccaccaccaccctcgacctctcctacaacatcctcttccagctccagtcctccgacttccactccgtctccaagctccgcgtcctcatcctctgccacaaccgcatccagcagctcgacctcaagaccttcgagttcaacaaggagctccgctacctcgacctctccaacaaccgcctcaagtccgtcacctggtacctcctcgccggcctccgctacctcgacctctccttcaacgacttcgacaccatgcccatctgcgaggaggccggcaacatgtcccacctcgagatcctcggcctctccggcgccaagatccagaagtccgacttccagaagatcgcccacctccacctcaacaccgtcttcctcggcttccgcaccctcccccactacgaggagggctccctccccatcctcaacaccaccaagctccacatcgtcctccccatggacaccaacttctgggtcctcctccgcgacggcatcaagacctccaagatcctcgagatgaccaacatcgacggcaagtcccagttcgtctcctacgagatgcagcgcaacctctccctcgagaacgccaagacctccgtcctcctcctcaacaaggtcgacctcctctgggacgacctcttcctcatcctccagttcgtctggcacacctccgtcgagcacttccagatccgcaacgtcaccttcggcggcaaggcctacctcgaccacaactccttcgactactccaacaccgtcatgcgcaccatcaagctcgagcacgtccacttccgcgtcttctacatccagcaggacaagatctacctcctcctcaccaagatggacatcgagaacctcaccatctccaacgcccagatgccccacatgctcttccccaactaccccaccaagttccagtacctcaacttcgccaacaacatcctcaccgacgagctcttcaagcgcaccatccagctcccccacctcaagaccctcatcctcaacggcaacaagctcgagaccctctccctcgtctcctgcttcgccaacaacacccccctcgagcacctcgacctctcccagaacctcctccagcacaagaacgacgagaactgctcctggcccgagaccgtcgtcaacatgaacctctcctacaacaagctctccgactccgtcttccgctgcctccccaagtccatccagatcctcgacctcaacaacaaccagatccagaccgtccccaaggagaccatccacctcatggccctccgcgagctcaacatcgccttcaacttcctcaccgacctccccggctgctcccacttctcccgcctctccgtcctcaacatcgagatgaacttcatcctctccccctccctcgacttcgtccagtcctgccaggaggtcaagaccctcaacgccggccgcaaccccttccgctgcacctgcgagctcaagaacttcatccagctcgagacctactccgaggtcatgatggtcggctggtccgactcctacacctgcgagtaccccctcaacctccgcggcacccgcctcaaggacgtccacctccacgagctctcctgcaacaccgccctcctcatcgtcaccatcgtcgtcatcatgctcgtcctcggcctcgccgtcgccttctgctgcctccacttcgacctcccctggtacctccgcatgctcggccagtgcacccagacctggcaccgcgtccgcaagaccacccaggagcagctcaagcgcaacgtccgcttccacgccttcatctcctactccgagcacgactccctctgggtcaagaacgagctcatccccaacctcgagaaggaggacggctccatcctcatctgcctctacgagtcctacttcgaccccggcaagtccatctccgagaacatcgtctccttcatcgagaagtcctacaagtccatcttcgtcctctcccccaacttcgtccagaacgagtggtgccactacgagttctacttcgcccaccacaacctcttccacgagaactccgaccacatcatcctcatcctcctcgagcccatccccttctactgcatccccacccgctaccacaagctcaaggccctcctcgagaagaaggcctacctcgagtggcccaaggaccgccgcaagtgcggcctcttctgggccaacctccgcgccgccatcaacgtcaacgtcctcgccacccgcgagatgtacgagctccagaccttcaccgagctcaacgaggagtcccgcggctccaccatctccctcatgcgcaccgactgcctctga

SEQ ID NO: 9477 - RNA, 2436 nt, synthetic construct
  misc_feature 1..2436: note = derived and/or modified sequence opt3 fromTLR10__Homo_sapiens__AAY78485
  source 1..2436: mol_type = other RNA
atgagactgatcaggaacatttacatattctgcagcatcgtgatgaccgccgagggcgacgctcccgaactccctgaggaacgggagcttatgacaaattgttccaacatgtctctgcgcaaggtcccagcagatttgactccggccacgaccacattagacctgtcatataatattctatttcagctccaaagtagcgatttccactccgtttctaaactgcgagtgcttatcctgtgccataaccgtattcagcagttggacctcaagacttttgagttcaataaagaactgagatacctggatctctcgaacaataggttaaagtcagtaacctggtatctgcttgcggggttgcggtacctggacctcagctttaacgatttcgacacaatgcccatctgtgaggaagctggaaatatgagtcacctcgagatactgggtctttccggcgccaaaatccagaagtctgattttcaaaagattgcacatctgcacttgaacaccgtgttcctcgggtttcgcactctgcctcattatgaagagggaagccttccaatcctgaatacaaccaaactccacattgtccttcccatggacacgaacttctgggtgctgttgagagatggcatcaagacttccaaaatactagagatgaccaatattgacggtaagtcacagtttgttagttacgaaatgcagaggaacctgagcctcgagaatgccaaaacatctgtgctgcttctgaacaaggtcgatttgctctgggacgacctgttcttaatcctgcagtttgtgtggcacacttccgtagaacatttccaaattcggaacgttaccttcgggggaaaggcttatctagatcacaattcatttgactacagcaacacagtgatgcgcaccatcaaactcgagcatgtccacttccgagtgttttacatccagcaggataagatttatctgcttttgacgaaaatggacatagaaaatctgactatcagtaacgcacagatgcctcacatgctattcccaaattaccccacaaagtttcaatatctgaacttcgccaataacattcttaccgatgagctgtttaaaagaactatccagttgcctcatctcaagacactgatattaaatggcaacaaactggagaccctatctctcgtgtcctgcttcgctaataacacgccactggaacaccttgacttgagccagaatctgctccaacataagaacgatgagaattgttcgtggccggaaaccgtcgttaacatgaacctgtcttacaataagttatccgactcagtgtttaggtgcctgcccaaaagtattcagatccttgatttgaacaataaccagatccagacagtacctaaggagactattcacctcatggccctgcgggaactaaatatcgcgttcaactttctgaccgacctcccaggctgtagccatttctcccgtctgtctgtgcttaatattgagatgaactttatattgagcccctcactggatttcgtccaaagttgccaggaggtgaaaacattaaatgcagggcgcaaccctttcagatgtacttgcgaactcaagaattttatccagctggagacctattccgaagttatgatggtgggatggagcgactcttacacatgtgagtatccacttaacctgaggggtacccggttgaaagacgtccacctccacgaactgtcatgcaatactgccctactgattgtgacgatcgtagttatcatgctcgtgctgggccttgctgtcgccttctgctgtttgcattttgatctgccctggtacttacgaatgctcgggcagtgcacacaaacctggcaccgcgtgagaaagactacccaggagcagctgaagaggaacgtccggttccatgcatttattagttacagcgagcacgactccctttgggtgaaaaatgaactgataccgaacctagagaaggaagatggatctatcctcatttgtctgtatgagtcgtacttcgaccctggcaaaagcatctccgagaacattgtttcatttatcgaaaagagttataaatctatattcgtgttgagccccaattttgtacagaacgagtggtgccactacgagttctattttgctcatcacaatctgttccatgaaaactccgatcacatcattttaatcctcctggaaccaattcctttttactgtatccccacacgctatcataagttaaaggccctgttggagaaaaaggcgtacctcgagtggccaaaagacagaaggaagtgcggtctgttctgggccaatctacgtgcagctataaacgtcaatgtgctggccacccgggaaatgtacgagcttcaaactttcacagaactcaacgaggaatcacgagggagcacgatttctctgatgagaaccgattgtttgtga

SEQ ID NO: 9478 - RNA, 2436 nt, synthetic construct
  misc_feature 1..2436: note = derived and/or modified sequence opt4 fromTLR10__Homo_sapiens__AAY78485
  source 1..2436: mol_type = other RNA
atgagactgatcagaaacatctacatcttctgcagcatcgtgatgaccgccgagggcgacgcccccgagctgcccgaggagagagagctgatgaccaactgcagcaacatgagcctgagaaaggtgcccgccgacctgacccccgccaccaccaccctggacctgagctacaacatcctgttccagctgcagagcagcgacttccacagcgtgagcaagctgagagtgctgatcctgtgccacaacagaatccagcagctggacctgaagaccttcgagttcaacaaggagctgagatacctggacctgagcaacaacagactgaagagcgtgacctggtacctgctggccggcctgagatacctggacctgagcttcaacgacttcgacaccatgcccatctgcgaggaggccggcaacatgagccacctggagatcctgggcctgagcggcgccaagatccagaagagcgacttccagaagatcgcccacctgcacctgaacaccgtgttcctgggcttcagaaccctgccccactacgaggagggcagcctgcccatcctgaacaccaccaagctgcacatcgtgctgcccatggacaccaacttctgggtgctgctgagagacggcatcaagaccagcaagatcctggagatgaccaacatcgacggcaagagccagttcgtgagctacgagatgcagagaaacctgagcctggagaacgccaagaccagcgtgctgctgctgaacaaggtggacctgctgtgggacgacctgttcctgatcctgcagttcgtgtggcacaccagcgtggagcacttccagatcagaaacgtgaccttcggcggcaaggcctacctggaccacaacagcttcgactacagcaacaccgtgatgagaaccatcaagctggagcacgtgcacttcagagtgttctacatccagcaggacaagatctacctgctgctgaccaagatggacatcgagaacctgaccatcagcaacgcccagatgccccacatgctgttccccaactaccccaccaagttccagtacctgaacttcgccaacaacatcctgaccgacgagctgttcaagagaaccatccagctgccccacctgaagaccctgatcctgaacggcaacaagctggagaccctgagcctggtgagctgcttcgccaacaacacccccctggagcacctggacctgagccagaacctgctgcagcacaagaacgacgagaactgcagctggcccgagaccgtggtgaacatgaacctgagctacaacaagctgagcgacagcgtgttcagatgcctgcccaagagcatccagatcctggacctgaacaacaaccagatccagaccgtgcccaaggagaccatccacctgatggccctgagagagctgaacatcgccttcaacttcctgaccgacctgcccggctgcagccacttcagcagactgagcgtgctgaacatcgagatgaacttcatcctgagccccagcctggacttcgtgcagagctgccaggaggtgaagaccctgaacgccggcagaaaccccttcagatgcacctgcgagctgaagaacttcatccagctggagacctacagcgaggtgatgatggtgggctggagcgacagctacacctgcgagtaccccctgaacctgagaggcaccagactgaaggacgtgcacctgcacgagctgagctgcaacaccgccctgctgatcgtgaccatcgtggtgatcatgctggtgctgggcctggccgtggccttctgctgcctgcacttcgacctgccctggtacctgagaatgctgggccagtgcacccagacctggcacagagtgagaaagaccacccaggagcagctgaagagaaacgtgagattccacgccttcatcagctacagcgagcacgacagcctgtgggtgaagaacgagctgatccccaacctggagaaggaggacggcagcatcctgatctgcctgtacgagagctacttcgaccccggcaagagcatcagcgagaacatcgtgagcttcatcgagaagagctacaagagcatcttcgtgctgagccccaacttcgtgcagaacgagtggtgccactacgagttctacttcgcccaccacaacctgttccacgagaacagcgaccacatcatcctgatcctgctggagcccatccccttctactgcatccccaccagataccacaagctgaaggccctgctggagaagaaggcctacctggagtggcccaaggacagaagaaagtgcggcctgttctgggccaacctgagagccgccatcaacgtgaacgtgctggccaccagagagatgtacgagctgcagaccttcaccgagctgaacgaggagagcagaggcagcaccatcagcctgatgagaaccgactgcctgtga

SEQ ID NO: 9479 - RNA, 2436 nt, synthetic construct
  misc_feature 1..2436: note = derived and/or modified sequence opt5 fromTLR10__Homo_sapiens__AAY78485
  source 1..2436: mol_type = other RNA
atgagactgatccggaacatttacatcttctgcagcattgtgatgaccgccgagggcgacgctcccgaactccctgaggaacgcgagctgatgacaaattgttccaacatgtctcttagaaaggtcccggccgatctgacgcccgcgaccacaaccctcgacctgagctataatatcctttttcagctgcaatcctctgatttccacagcgtttccaaactccgggtgctgattctgtgccataaccgcatccagcagctcgacctgaagacatttgagttcaataaagaacttagatacctggatctctctaacaatcggctcaagagcgtgacctggtatcttctggctgggctccgctacctggacctgtcctttaacgatttcgacacaatgcctatctgtgaggaagccggaaatatgagccacctcgagattctgggcctttctggggccaaaatccagaagtccgattttcaaaagattgctcatctgcacctcaacaccgtcttcctgggatttagaacgcttccccattatgaagagggcagcctgcctatcctcaataccacaaaactgcacattgtgctgcccatggacaccaacttctgggttctcctgcgggatgggatcaagacatctaaaattcttgagatgaccaatatcgacggaaagtcccagtttgtgagctacgaaatgcagcgcaacctgtctctcgagaatgccaaaacgtccgtcctgcttctgaacaaggtggatctcctgtgggacgacctgttcctcatcctgcagtttgtttggcacacaagcgtggaacatttccaaattagaaacgtcaccttcggcggcaaggcttatcttgatcacaattcctttgactactctaacacagtgatgcggaccatcaaactggagcatgtgcacttccgcgtcttttacattcagcaggataagatctatctcctgctgaccaaaatggacattgaaaatcttacaatcagcaacgcccagatgcctcacatgctgttcccgaattaccccacgaagtttcaatatctgaacttcgcgaataacatcctgaccgatgagctctttaaaagaacaattcagctgcctcatcttaagaccctgatcctcaatgggaacaaactggagacactgtcccttgttagctgcttcgccaataacacgcccctcgaacacctggacctgtctcagaatctcctgcaacataagaacgatgagaattgttcctggcctgaaaccgtggtgaacatgaaccttagctacaataagctgtctgacagcgtctttcggtgcctccccaaatccattcagatcctggatctgaacaataaccagattcagacagtgccgaaggagaccatccaccttatggctctccgcgaactgaatatcgccttcaactttctgaccgacctccctggatgttctcatttcagcagactgtccgttcttaatattgagatgaactttatcctgagcccctctctcgatttcgtgcaatcctgccaggaggtcaaaacactgaatgctggccggaaccctttcagatgtacctgcgaactgaagaattttattcagcttgagacatatagcgaagtgatgatggttgggtggtctgactcctacacgtgtgagtatcccctcaacctgcgcggaacccggctgaaagacgtgcacctccacgaactgagctgcaatacagcccttctgatcgtcaccattgtggtcatcatgctcgtgctgggcctggcggttgccttctgctgtcttcattttgatctgccctggtacctcagaatgctggggcagtgcacacaaacctggcaccgcgtgcggaagacgacccaggagcagctcaagagaaacgtccgcttccatgcttttatttcctactctgagcacgacagcctgtgggtgaaaaatgaacttatccctaacctggagaaggaagatggatccatcctcatttgtctgtatgagtcttacttcgacccgggcaaaagcatctccgagaacattgttagctttatcgaaaagtcttataaatccattttcgtgctgagccccaattttgtccagaacgagtggtgccactacgagttctattttgcccatcacaatcttttccatgaaaactctgatcacatcatcctgattctcctggaacctatccccttttactgtattcctacacggtatcataagctcaaggctctgcttgagaaaaaggcctacctggagtggcccaaagacagacgcaagtgcggcctcttctgggccaatctgcgggctgcgatcaacgtgaatgtgctggccaccagagaaatgtacgagcttcaaacattcaccgaactgaacgaggaatcccgcgggagcacgatttctctcatgcggacagattgtctgtga

SEQ ID NO: 9480 - protein, 811 aa, synthetic construct [sequence omitted]

SEQ ID NO: 9481 - RNA, 2436 nt, synthetic construct
  misc_feature 1..2436: note = TLR10__Homo_sapiens__AAY78486
  source 1..2436: mol_type = other RNA
atgagactcatcagaaacatttacatattttgtagtattgttatgacagcagagggtgatgctccagagctgccagaagaaagggaactgatgaccaactgctccaacatgtctctaagaaaggttcccgcagacttgaccccagccacaacgacactggatttatcctataacctcctttttcaactccagagttcagattttcattctgtctccaaactgagagttttgattctatgccataacagaattcaacagctggatctcaaaacctttgaattcaacaaggagttaagatatttagatttgtctaataacagactgaagagtgtaacttggtatttactggcaggtctcaggtatttagatctttcttttaatgactttgacaccatgcctatctgtgaggaagctggcaacatgtcacacctggaaatcctaggtttgagtggggcaaaaatacaaaaatcagatttccagaaaattgctcatctgcatctaaatactgtcttcttaggattcagaactcttcctcattatgaagaaggtagcctgcccatcttaaacacaacaaaactgcacattgttttaccaatggacacaaatttctgggttcttttgcgtgatggaatcaagacttcaaaaatattagaaatgacaaatatagatggcaaaagccaatttgtaagttatgaaatgcaacgaaatcttagtttagaaaatgctaagacatcggttctattgcttaataaagttgatttactctgggacgaccttttccttatcttacaatttgtttggcatacatcagtggaacactttcagatccgaaatgtgacttttggtggtaaggcttatcttgaccacaattcatttgactactcaaatactgtaatgagaactataaaattggagcatgtacatttcagagtgttttacattcaacaggataaaatctatttgcttttgaccaaaatggacatagaaaacctgacaatatcaaatgcacaaatgccacacatgcttttcccgaattatcctacgaaattccaatatttaaattttgccaataatatcttaacagacgagttgtttaaaagaactatccaactgcctcacttgaaaactctcattttgaatggcaataaactggagacactttctttagtaagttgctttgctaacaacacacccttggaacacttggatctgagtcaaaatctattacaacataaaaatgatgaaaattgctcatggccagaaactgtggtcaatatgaatctgtcatacaataaattgtctgattctgtcttcaggtgcttgcccaaaagtattcaaatacttgacctaaataataaccaaatccaaactgtacctaaagagactattcatctgatggccttacgagaactaaatattgcatttaattttctaactgatctccctggatgcagtcatttcagtagactttcagttctgaacattgaaatgaacttcattctcagcccatctctggattttgttcagagctgccaggaagttaaaactctaaatgcgggaagaaatccattccggtgtacctgtgaattaaaaaatttcattcagcttgaaacatattcagaggtcatgatggttggatggtcagattcatacacctgtgaataccctttaaacctaaggggaactaggttaaaagacgttcatctccacgaattatcttgcaacacagctctgttgattgtcaccattgtggttattatgctagttctggggttggctgtggccttctgctgtctccactttgatctgccctggtatctcaggatgctaggtcaatgcacacaaacatggcacagggttaggaaaacaacccaagaacaactcaagagaaatgtccgattccacgcatttatttcatacagtgaacatgattctctgtgggtgaagaatgaattgatccccaatctagagaaggaagatggttctatcttgatttgcctttatgaaagctactttgaccctggcaaaagcattagtgaaaatattgtaagcttcattgagaaaagctataagtccatctttgttttgtctcccaactttgtccagaatgagtggtgccattatgaattctactttgcccaccacaatctcttccatgaaaattctgatcatataattcttatcttactggaacccattccattctattgcattcccaccaggtatcataaactgaaagctctcctggaaaaaaaagcatacttggaatggcccaaggataggcgtaaatgtgggcttttctgggcaaaccttcgagctgctattaatgttaatgtattagccaccagagaaatgtatgaactgcagacattcacagagttaaatgaagagtctcaaggttctacaatctctctgatgagaacagattgtctataa

SEQ ID NO: 9482 - RNA, 2436 nt, synthetic construct
  misc_feature 1..2436: note = derived and/or modified sequence opt1 fromTLR10__Homo_sapiens__AAY78486
  source 1..2436: mol_type = other RNA
atgcgcctgatccggaacatctacatcttctgcagcatcgtgatgaccgccgagggcgacgcccccgagctcccggaggagcgcgagctgatgaccaactgctccaacatgagcctgcggaaggtccccgcggacctcacgcccgccaccaccaccctggacctgtcctacaacctcctgttccagctgcagagctccgacttccacagcgtgtccaagctccgcgtgctgatcctgtgccacaaccggatccagcagctcgacctgaagacgttcgagttcaacaaggagctgcgctacctcgacctgagcaacaaccggctgaagtccgtcacctggtacctcctggccgggctgcgctacctcgacctgagcttcaacgacttcgacaccatgcccatctgcgaggaggccggcaacatgtcccacctggagatcctcgggctgagcggcgccaagatccagaagtccgacttccagaagatcgcgcacctccacctcaacaccgtgttcctggggttccggacgctgccgcactacgaggagggcagcctccccatcctgaacaccaccaagctgcacatcgtgctccccatggacaccaacttctgggtcctgctgcgcgacggcatcaagacgtccaagatcctcgagatgaccaacatcgacgggaagtcccagttcgtgagctacgagatgcagcggaacctgagcctggagaacgccaagacctccgtgctcctgctgaacaaggtcgacctcctgtgggacgacctgttcctcatcctgcagttcgtgtggcacaccagcgtggagcacttccagatccgcaacgtcacgttcggcgggaaggcctacctggaccacaacagcttcgactactccaacaccgtgatgcggaccatcaagctcgagcacgtgcacttccgcgtcttctacatccagcaggacaagatctacctgctgctgaccaagatggacatcgagaacctcacgatcagcaacgcccagatgccccacatgctgttcccgaactaccccaccaagttccagtacctgaacttcgcgaacaacatcctcaccgacgagctgttcaagcggaccatccagctgccccacctcaagacgctgatcctgaacggcaacaagctcgagaccctgtccctggtgagctgcttcgccaacaacacgcccctcgagcacctggacctgtcccagaacctcctgcagcacaagaacgacgagaactgcagctggccggagaccgtggtcaacatgaacctgtcctacaacaagctcagcgactccgtgttccgctgcctgcccaagagcatccagatcctggacctcaacaacaaccagatccagaccgtgcccaaggagaccatccacctgatggccctgcgggagctcaacatcgccttcaacttcctgaccgacctgcccgggtgctcccacttcagccgcctctccgtcctgaacatcgagatgaacttcatcctgagcccgtccctcgacttcgtgcagagctgccaggaggtgaagaccctgaacgccggccggaaccccttccgctgcacgtgcgagctgaagaacttcatccagctcgagacctactccgaggtcatgatggtgggctggagcgactcctacacgtgcgagtaccccctgaacctgcgggggacccgcctcaaggacgtccacctccacgagctgagctgcaacaccgcgctgctgatcgtgaccatcgtggtcatcatgctggtgctcggcctggccgtggccttctgctgcctgcacttcgacctcccctggtacctgcgcatgctggggcagtgcacccagacctggcaccgggtccgcaagaccacgcaggagcagctcaagcggaacgtgcgcttccacgccttcatcagctactccgagcacgacagcctgtgggtgaagaacgagctgatcccgaacctcgagaaggaggacggctccatcctgatctgcctgtacgagagctacttcgaccccggcaagtccatcagcgagaacatcgtctccttcatcgagaagtcctacaagagcatcttcgtgctcagccccaacttcgtgcagaacgagtggtgccactacgagttctacttcgcccaccacaacctgttccacgagaactccgaccacatcatcctgatcctcctggagcccatcccgttctactgcatccccacccggtaccacaagctgaaggcgctcctggagaagaaggcctacctggagtggcccaaggaccgccggaagtgcgggctgttctgggccaacctgcgcgccgccatcaacgtcaacgtgctggcgacccgggagatgtacgagctccagaccttcacggagctgaacgaggagagccagggctccaccatcagcctgatgcgcaccgactgcctctga

SEQ ID NO: 9483 - RNA, 2436 nt, synthetic construct
  misc_feature 1..2436: note = derived and/or modified sequence opt2 fromTLR10__Homo_sapiens__AAY78486
  source 1..2436: mol_type = other RNA
atgcgcctcatccgcaacatctacatcttctgctccatcgtcatgaccgccgagggcgacgcccccgagctccccgaggagcgcgagctcatgaccaactgctccaacatgtccctccgcaaggtccccgccgacctcacccccgccaccaccaccctcgacctctcctacaacctcctcttccagctccagtcctccgacttccactccgtctccaagctccgcgtcctcatcctctgccacaaccgcatccagcagctcgacctcaagaccttcgagttcaacaaggagctccgctacctcgacctctccaacaaccgcctcaagtccgtcacctggtacctcctcgccggcctccgctacctcgacctctccttcaacgacttcgacaccatgcccatctgcgaggaggccggcaacatgtcccacctcgagatcctcggcctctccggcgccaagatccagaagtccgacttccagaagatcgcccacctccacctcaacaccgtcttcctcggcttccgcaccctcccccactacgaggagggctccctccccatcctcaacaccaccaagctccacatcgtcctccccatggacaccaacttctgggtcctcctccgcgacggcatcaagacctccaagatcctcgagatgaccaacatcgacggcaagtcccagttcgtctcctacgagatgcagcgcaacctctccctcgagaacgccaagacctccgtcctcctcctcaacaaggtcgacctcctctgggacgacctcttcctcatcctccagttcgtctggcacacctccgtcgagcacttccagatccgcaacgtcaccttcggcggcaaggcctacctcgaccacaactccttcgactactccaacaccgtcatgcgcaccatcaagctcgagcacgtccacttccgcgtcttctacatccagcaggacaagatctacctcctcctcaccaagatggacatcgagaacctcaccatctccaacgcccagatgccccacatgctcttccccaactaccccaccaagttccagtacctcaacttcgccaacaacatcctcaccgacgagctcttcaagcgcaccatccagctcccccacctcaagaccctcatcctcaacggcaacaagctcgagaccctctccctcgtctcctgcttcgccaacaacacccccctcgagcacctcgacctctcccagaacctcctccagcacaagaacgacgagaactgctcctggcccgagaccgtcgtcaacatgaacctctcctacaacaagctctccgactccgtcttccgctgcctccccaagtccatccagatcctcgacctcaacaacaaccagatccagaccgtccccaaggagaccatccacctcatggccctccgcgagctcaacatcgccttcaacttcctcaccgacctccccggctgctcccacttctcccgcctctccgtcctcaacatcgagatgaacttcatcctctccccctccctcgacttcgtccagtcctgccaggaggtcaagaccctcaacgccggccgcaaccccttccgctgcacctgcgagctcaagaacttcatccagctcgagacctactccgaggtcatgatggtcggctggtccgactcctacacctgcgagtaccccctcaacctccgcggcacccgcctcaaggacgtccacctccacgagctctcctgcaacaccgccctcctcatcgtcaccatcgtcgtcatcatgctcgtcctcggcctcgccgtcgccttctgctgcctccacttcgacctcccctggtacctccgcatgctcggccagtgcacccagacctggcaccgcgtccgcaagaccacccaggagcagctcaagcgcaacgtccgcttccacgccttcatctcctactccgagcacgactccctctgggtcaagaacgagctcatccccaacctcgagaaggaggacggctccatcctcatctgcctctacgagtcctacttcgaccccggcaagtccatctccgagaacatcgtctccttcatcgagaagtcctacaagtccatcttcgtcctctcccccaacttcgtccagaacgagtggtgccactacgagttctacttcgcccaccacaacctcttccacgagaactccgaccacatcatcctcatcctcctcgagcccatccccttctactgcatccccacccgctaccacaagctcaaggccctcctcgagaagaaggcctacctcgagtggcccaaggaccgccgcaagtgcggcctcttctgggccaacctccgcgccgccatcaacgtcaacgtcctcgccacccgcgagatgtacgagctccagaccttcaccgagctcaacgaggagtcccagggctccaccatctccctcatgcgcaccgactgcctctga

SEQ ID NO: 9484 - RNA, 2436 nt, synthetic construct
  misc_feature 1..2436: note = derived and/or modified sequence opt3 fromTLR10__Homo_sapiens__AAY78486
  source 1..2436: mol_type = other RNA
atgagactgatcaggaacatttacatattctgcagcatcgtgatgaccgccgagggcgacgctcccgaactccctgaggaacgggagcttatgacaaattgttccaacatgtctctgcgcaaggtcccagcagatttgactccggccacgaccacattagacctgtcatataatctactctttcagctgcaaagtagcgatttccactccgtttctaaacttcgagtgctgattttgtgccataaccgtatccagcagctcgacctgaagacttttgagttcaataaagaactgagatacctcgatttatcgaacaataggctgaagtcagtaacctggtatcttttggcggggctgcggtacctagacctcagctttaacgatttcgacacaatgcccatttgtgaggaagctggaaatatgagtcacctggagatccttggtctgtccggcgccaaaatacagaagtctgattttcaaaagatcgcacatttgcacctcaacaccgtgttcctggggtttcgcactttacctcattatgaagagggaagcctgccaattctcaatacaaccaaacttcacatcgtcctgcccatggacacgaacttctgggtgttgctaagagatggcattaagacttccaaaatcctggagatgaccaatatagacggtaagtcacagtttgttagttacgaaatgcagaggaacctcagcctggagaatgccaaaacatctgtgcttctgttgaacaaggtcgatctcctgtgggacgacttattcctgattctacagtttgtgtggcacacttccgtagaacatttccaaatccggaacgttaccttcgggggaaaggcttatctcgatcacaattcatttgactacagcaacacagtgatgcgcaccattaaactggagcatgtccacttccgagtgttttacatccagcaggataagatctatcttttgctgacgaaaatggacattgaaaatctcactataagtaacgcacagatgcctcacatgctgttcccaaattaccccacaaagtttcaatatcttaacttcgccaataacatcctgaccgatgagttgtttaaaagaactattcagctccctcatctgaagacattaatcctgaatggcaacaaactagagaccctctctctggtgtcctgcttcgctaataacacgccacttgaacacttggacctgagccagaatctcctgcaacataagaacgatgagaattgttcgtggccggaaaccgtcgttaacatgaacttatcttacaataagctgtccgactcagtgtttaggtgccttcccaaaagtatacagattttggatctcaacaataaccagatccagacagtacctaaggagactatccacctgatggccctacgggaactgaatattgcgttcaactttctcaccgacctgccaggctgtagccatttctcccgtctttctgtgttgaatatcgagatgaactttattctgagcccctcattagatttcgtccaaagttgccaggaggtgaaaacactcaatgcagggcgcaaccctttcagatgtacttgcgaactgaagaattttatacagcttgagacctattccgaagttatgatggtgggatggagcgactcttacacatgtgagtatccactgaacttgaggggtacccggctcaaagacgtccatctgcacgaactatcatgcaatactgccctgctcatcgtgacgattgtagttatcatgctggtgcttggcttggctgtcgccttctgctgtctgcactttgatttaccctggtacctccgaatgctggggcagtgcacacaaacctggcaccgcgtgagaaagactacccaggagcagcttaagaggaacgtccggttccatgcatttatcagttacagcgagcacgactccctgtgggtgaaaaatgaactaattccgaacctcgagaaggaagatggatctatactgatctgtttgtatgagtcgtacttcgaccctggcaaaagcatttccgagaacatcgtttcatttattgaaaagagttataaatctatcttcgtgctgagccccaattttgtacagaacgagtggtgccactacgagttctattttgctcatcacaatttattccatgaaaactccgatcacataatcctcattctgcttgaaccaatccctttttactgtattcccacacgctatcataagctgaaggccttgctcgagaaaaaggcgtacctggagtggccaaaagacagaaggaagtgcggtctattctgggccaatctgcgtgcagctatcaacgtcaatgtgcttgccacccgggaaatgtacgagctccaaactttcacagaactgaacgaggaatcacaggggagcacgatatctttgatgcgaaccgattgtctgtga

SEQ ID NO: 9485 - RNA, 2436 nt, synthetic construct
  misc_feature 1..2436: note = derived and/or modified sequence opt4 fromTLR10__Homo_sapiens__AAY78486
  source 1..2436: mol_type = other RNA
atgagactgatcagaaacatctacatcttctgcagcatcgtgatgaccgccgagggcgacgcccccgagctgcccgaggagagagagctgatgaccaactgcagcaacatgagcctgagaaaggtgcccgccgacctgacccccgccaccaccaccctggacctgagctacaacctgctgttccagctgcagagcagcgacttccacagcgtgagcaagctgagagtgctgatcctgtgccacaacagaatccagcagctggacctgaagaccttcgagttcaacaaggagctgagatacctggacctgagcaacaacagactgaagagcgtgacctggtacctgctggccggcctgagatacctggacctgagcttcaacgacttcgacaccatgcccatctgcgaggaggccggcaacatgagccacctggagatcctgggcctgagcggcgccaagatccagaagagcgacttccagaagatcgcccacctgcacctgaacaccgtgttcctgggcttcagaaccctgccccactacgaggagggcagcctgcccatcctgaacaccaccaagctgcacatcgtgctgcccatggacaccaacttctgggtgctgctgagagacggcatcaagaccagcaagatcctggagatgaccaacatcgacggcaagagccagttcgtgagctacgagatgcagagaaacctgagcctggagaacgccaagaccagcgtgctgctgctgaacaaggtggacctgctgtgggacgacctgttcctgatcctgcagttcgtgtggcacaccagcgtggagcacttccagatcagaaacgtgaccttcggcggcaaggcctacctggaccacaacagcttcgactacagcaacaccgtgatgagaaccatcaagctggagcacgtgcacttcagagtgttctacatccagcaggacaagatctacctgctgctgaccaagatggacatcgagaacctgaccatcagcaacgcccagatgccccacatgctgttccccaactaccccaccaagttccagtacctgaacttcgccaacaacatcctgaccgacgagctgttcaagagaaccatccagctgccccacctgaagaccctgatcctgaacggcaacaagctggagaccctgagcctggtgagctgcttcgccaacaacacccccctggagcacctggacctgagccagaacctgctgcagcacaagaacgacgagaactgcagctggcccgagaccgtggtgaacatgaacctgagctacaacaagctgagcgacagcgtgttcagatgcctgcccaagagcatccagatcctggacctgaacaacaaccagatccagaccgtgcccaaggagaccatccacctgatggccctgagagagctgaacatcgccttcaacttcctgaccgacctgcccggctgcagccacttcagcagactgagcgtgctgaacatcgagatgaacttcatcctgagccccagcctggacttcgtgcagagctgccaggaggtgaagaccctgaacgccggcagaaaccccttcagatgcacctgcgagctgaagaacttcatccagctggagacctacagcgaggtgatgatggtgggctggagcgacagctacacctgcgagtaccccctgaacctgagaggcaccagactgaaggacgtgcacctgcacgagctgagctgcaacaccgccctgctgatcgtgaccatcgtggtgatcatgctggtgctgggcctggccgtggccttctgctgcctgcacttcgacctgccctggtacctgagaatgctgggccagtgcacccagacctggcacagagtgagaaagaccacccaggagcagctgaagagaaacgtgagattccacgccttcatcagctacagcgagcacgacagcctgtgggtgaagaacgagctgatccccaacctggagaaggaggacggcagcatcctgatctgcctgtacgagagctacttcgaccccggcaagagcatcagcgagaacatcgtgagcttcatcgagaagagctacaagagcatcttcgtgctgagccccaacttcgtgcagaacgagtggtgccactacgagttctacttcgcccaccacaacctgttccacgagaacagcgaccacatcatcctgatcctgctggagcccatccccttctactgcatccccaccagataccacaagctgaaggccctgctggagaagaaggcctacctggagtggcccaaggacagaagaaagtgcggcctgttctgggccaacctgagagccgccatcaacgtgaacgtgctggccaccagagagatgtacgagctgcagaccttcaccgagctgaacgaggagagccagggcagcaccatcagcctgatgagaaccgactgcctgtga

SEQ ID NO: 9486 - RNA, 2436 nt, synthetic construct
  misc_feature 1..2436: note = derived and/or modified sequence opt5 fromTLR10__Homo_sapiens__AAY78486
  source 1..2436: mol_type = other RNA
atgagactgatccggaacatttacatcttctgcagcattgtgatgaccgccgagggcgacgctcccgaactccctgaggaacgcgagctgatgacaaattgttccaacatgtctcttagaaaggtcccggccgatctgacgcccgcgaccacaaccctcgacctgagctataatcttctgtttcagctccaatcctctgatttccacagcgtttccaaactgcgggtgctgatcctctgccataaccgcattcagcagctggaccttaagacatttgagttcaataaagaactgagatacctcgatctgtctaacaatcggcttaagagcgtgacctggtatctgctcgctgggctgcgctacctggacctctcctttaacgatttcgacacaatgcctatctgtgaggaagccggaaatatgagccacctggagatccttggcctgtctggggccaaaattcagaagtccgattttcaaaagatcgctcatctccacctgaacaccgtcttccttggatttagaacgctgccccattatgaagagggcagcctccctattctgaataccacaaaactgcacatcgtgctccccatggacaccaacttctgggttctgcttcgggatgggattaagacatctaaaatcctggagatgaccaatattgacggaaagtcccagtttgtgagctacgaaatgcagcgcaacctctctctggagaatgccaaaacgtccgtccttctgctcaacaaggtggatctgctgtgggacgacctcttcctgatccttcagtttgtttggcacacaagcgtggaacatttccaaatcagaaacgtcaccttcggcggcaaggcttatctggatcacaattcctttgactactctaacacagtgatgcggaccattaaactcgagcatgtgcacttccgcgtcttttacatccagcaggataagatttatctgctgcttaccaaaatggacatcgaaaatctcacaattagcaacgcccagatgcctcacatgctgttcccgaattaccccacgaagtttcaatatctgaacttcgcgaataacatcctcaccgatgagctgtttaaaagaacaatccagcttcctcatctgaagaccctcattctgaatgggaacaaactggagacactttccctcgttagctgcttcgccaataacacgcccctggaacacctggacctctctcagaatctgcttcaacataagaacgatgagaattgttcctggcctgaaaccgtggtgaacatgaacctgagctacaataagctctctgacagcgtctttcggtgcctgcccaaatccatccagattctggatcttaacaataaccagatccagacagtgccgaaggagaccattcacctcatggctctgcgcgaactgaatatcgccttcaactttctcaccgacctgcctggatgttctcatttcagcagactttccgttctgaatatcgagatgaactttattctcagcccctctctggatttcgtgcaatcctgccaggaggtcaaaacactgaatgctggccggaaccctttcagatgtacctgcgaacttaagaattttatccagctcgagacatatagcgaagtgatgatggttgggtggtctgactcctacacgtgtgagtatcccctgaacctgcgcggaacccggctcaaagacgtgcaccttcacgaacttagctgcaatacagccctgctcattgtcaccatcgtggtcattatgctggtgctgggccttgcggttgccttctgctgtctgcattttgatctcccctggtacctgagaatgctcgggcagtgcacacaaacctggcaccgcgtgcggaagacgacccaggagcagctgaagagaaacgtccgcttccatgcttttatctcctactctgagcacgacagcctttgggtgaaaaatgaactgattcctaacctcgagaaggaagatggatccatcctgatctgtctgtatgagtcttacttcgacccgggcaaaagcatttccgagaacatcgttagctttattgaaaagtcttataaatccatcttcgtgcttagccccaattttgtccagaacgagtggtgccactacgagttctattttgcccatcacaatctgttccatgaaaactctgatcacattatcctcatcctgctcgaacctattcccttttactgtatccctacacggtatcataagctgaaggctctgctggagaaaaaggcctacctcgagtggcccaaagacagacgcaagtgcggcctgttctgggccaatctgcgggctgcgattaacgtgaatgtgcttgccaccagagaaatgtacgagctgcaaacattcaccgaactcaacgaggaatcccaggggagcacgatctctctgatgcgcacagattgtctctga

SEQ ID NO: 9487 - protein, 811 aa, synthetic construct [sequence omitted]

SEQ ID NO: 9488 - RNA, 2436 nt, synthetic construct
  misc_feature 1..2436: note = TLR10__Homo_sapiens__AAY78487
  source 1..2436: mol_type = other RNA
atgagactcatcagaaacatttacatattttgtagtatagttatgacagcagagggtgatgctccagagctgccagaagaaagggaactgatgaccaactgctccaacatgtctctaagaaaggttcccgcagacttgaccccagccacaacaacactggatttatcctataacctcctttttcaactccagagttcagattttcattctgtctccaaactgagagttttgattctatgccataacagaattcaacagctggatctcaaaacctttgaattcaacaaggagttaagatatttagatttgtctaataacagactgaagagtgtaacttggtatttactggcaggtctcaggtatttagatctttcttttaatgactttgacaccatgcctatctgtgaggaagctggcaacatgtcacacctggaaatcctaggtttgagtggggcaaaaatacaaaaatcagatttccagaaaatttctcatctgcatctaaatactgtcttcttaggattcagaactcttcctcattatgaagaaggtagcctgcccatcttaaacacaacaaaactgcacattgttttaccaatggacacaaatttctgggttcttttgcgtgatggaatcaagacttcaaaaatattagaaatgacaaatatagatggcaaaagccaatttgtaagttatgaaatgcaacgaaatcttagtttagaacatgctaagacatcggttctattgcttaataaagttgatttactctgggacgaccttttccttatcttacaatttgtttggcatacatcagtggaacactttcagatccgaaatgtgacttttggtggtaaggcttatcttgaccacaattcatttgactactcaaatactataatgagaactataaaattggagcatgtacatttcagagtgttttacattcaacaggataaaatctatttgcttttgaccaaaatggacatagaaaacctgacaatatcaaatgcacaaatgccacacatgcttttccctaattatcctacgaaattccaatatttaaattttgccaataatatcttaacagacgagttgtttaaaagaactctccaactgcctcacttgaaaactctcattttgaatggcaataaactggagacactttctttagtaagttgctttgctaacaacacacccttggaacacttggatctgagtcaaaatctattacaacataaaaatgatgaaaattgctcatggccagaaactgtggtcaatatgaatctgtcatacaataaattgtctgattctgtcttcaggtgcttgcccaaaagtattcaaatacttgacctaaataataaccaaatccaaactgtacctaaagagactattcatctgatggccttacgagaactaaatattgcatttaattttctaactgatctccctggatgcagtcatttcagtagactttcagttctgaacattgaaatgaacttcattctcagcccatctctggattttgttcagagctgccaggaagttaaaactctaaatgcgggaagaaatccattccggtgtacctgtgaattaaaaaatttcattcagcttgaaacatattcagaggtcatgatggttggatggtcagattcatacacctgtgaataccctttaaacctaaggggaactaggttaaaagacgttcatctccacgaattatcttgcaacacagctctgttgattgtcaccattgtggttattatgctagttctggggttggctgtggccttctgctgtctccactttgatctgccctggtatctcaggatgctaggtcaatgcacacaaacatggcacagggttaggaaaacaacccaagaacaactcaagagaaatgtccgattccacgcatttatttcatacagtgaacatgattctctgtgggtgaagaatgaattgatccccaatctagagaaggaagatggttctatcttgatttgcctttatgaaagctactttgaccctggcaaaagcattagtgaaaatattgtaagcttcattgagaaaagctataagtccatctttgttttgtctcccaactttgtccagaatgagtggtgccattatgaattctactttgcccaccacaatctcttccatgaaaattctgatcacataattcttatcttactggaacccattccattctattgcattcccaccaggtatcataaactgaaagctctcctggaaaaaaaagcatacttggaatggcccaaggataggcgtaaatgtgggcttttctgggcaaaccttcgagctgctattaatgttaatgtattagccaccagagaaatgtatgaactgcagacattcacagagttaaatgaagagtctcgaggttctacaatctctctgatgagaacagactgtctataa

SEQ ID NO: 9489 - RNA, 2436 nt, synthetic construct
  misc_feature 1..2436: note = derived and/or modified sequence opt1 fromTLR10__Homo_sapiens__AAY78487
  source 1..2436: mol_type = other RNA
atgcgcctgatccggaacatctacatcttctgcagcatcgtgatgaccgccgagggcgacgcccccgagctcccggaggagcgcgagctgatgaccaactgctccaacatgagcctgcggaaggtccccgcggacctcacgcccgccaccaccaccctggacctgtcctacaacctcctgttccagctgcagagctccgacttccacagcgtgtccaagctccgcgtgctgatcctgtgccacaaccggatccagcagctcgacctgaagacgttcgagttcaacaaggagctgcgctacctcgacctgagcaacaaccggctgaagtccgtcacctggtacctcctggccgggctgcgctacctcgacctgagcttcaacgacttcgacaccatgcccatctgcgaggaggccggcaacatgtcccacctggagatcctcgggctgagcggcgccaagatccagaagtccgacttccagaagatcagccacctccacctgaacaccgtgttcctggggttccggacgctgccgcactacgaggagggctccctccccatcctgaacaccaccaagctgcacatcgtgctccccatggacaccaacttctgggtcctgctgcgcgacggcatcaagacgagcaagatcctcgagatgaccaacatcgacgggaagtcccagttcgtgagctacgagatgcagcggaacctgtccctggagcacgcgaagaccagcgtgctcctgctgaacaaggtcgacctcctgtgggacgacctgttcctcatcctgcagttcgtgtggcacaccagcgtggagcacttccagatccgcaacgtcacgttcggcgggaaggcctacctggaccacaactccttcgactacagcaacaccatcatgcggaccatcaagctcgagcacgtgcacttccgcgtgttctacatccagcaggacaagatctacctgctgctgaccaagatggacatcgagaacctcacgatctccaacgcccagatgccccacatgctgttcccgaactaccccaccaagttccagtacctgaacttcgccaacaacatcctcaccgacgagctgttcaagcggaccctgcagctcccccacctgaagacgctgatcctcaacggcaacaagctggagaccctgagcctcgtctcctgcttcgcgaacaacacgcccctggagcacctggacctcagccagaacctgctgcagcacaagaacgacgagaactgctcctggccggagaccgtggtgaacatgaacctcagctacaacaagctgtccgacagcgtcttccgctgcctgcccaagtccatccagatcctcgacctgaacaacaaccagatccagaccgtgcccaaggagaccatccacctgatggccctccgggagctgaacatcgccttcaacttcctgaccgacctccccgggtgcagccacttctcccgcctgagcgtgctgaacatcgagatgaacttcatcctctccccgagcctggacttcgtccagtcctgccaggaggtgaagaccctgaacgccggccggaaccccttccgctgcacgtgcgagctcaagaacttcatccagctggagacctacagcgaggtgatgatggtcggctggtccgacagctacacgtgcgagtaccccctgaacctccgggggacccgcctgaaggacgtgcacctccacgagctgagctgcaacaccgccctgctgatcgtcaccatcgtggtgatcatgctcgtcctgggcctggcggtggccttctgctgcctccacttcgacctgccctggtacctgcgcatgctcgggcagtgcacccagacctggcaccgggtgcgcaagaccacgcaggagcagctgaagcggaacgtccgcttccacgccttcatctcctacagcgagcacgactccctgtgggtgaagaacgagctcatcccgaacctggagaaggaggacggcagcatcctgatctgcctctacgagtcctacttcgaccccggcaagagcatctccgagaacatcgtgagcttcatcgagaagtcctacaagagcatcttcgtcctgtcccccaacttcgtgcagaacgagtggtgccactacgagttctacttcgcccaccacaacctgttccacgagaacagcgaccacatcatcctcatcctgctggagcccatcccgttctactgcatccccacccggtaccacaagctcaaggccctgctggagaagaaggcgtacctcgagtggcccaaggaccgccggaagtgcgggctgttctgggccaacctgcgcgccgccatcaacgtgaacgtcctcgccacccgggagatgtacgagctgcagaccttcacggagctgaacgaggagtcccgcggcagcaccatctccctcatgcggaccgactgcctgtga

SEQ ID NO: 9490 - RNA, 2436 nt, synthetic construct
  misc_feature 1..2436: note = derived and/or modified sequence opt2 fromTLR10__Homo_sapiens__AAY78487
  source 1..2436: mol_type = other RNA
atgcgcctcatccgcaacatctacatcttctgctccatcgtcatgaccgccgagggcgacgcccccgagctccccgaggagcgcgagctcatgaccaactgctccaacatgtccctccgcaaggtccccgccgacctcacccccgccaccaccaccctcgacctctcctacaacctcctcttccagctccagtcctccgacttccactccgtctccaagctccgcgtcctcatcctctgccacaaccgcatccagcagctcgacctcaagaccttcgagttcaacaaggagctccgctacctcgacctctccaacaaccgcctcaagtccgtcacctggtacctcctcgccggcctccgctacctcgacctctccttcaacgacttcgacaccatgcccatctgcgaggaggccggcaacatgtcccacctcgagatcctcggcctctccggcgccaagatccagaagtccgacttccagaagatctcccacctccacctcaacaccgtcttcctcggcttccgcaccctcccccactacgaggagggctccctccccatcctcaacaccaccaagctccacatcgtcctccccatggacaccaacttctgggtcctcctccgcgacggcatcaagacctccaagatcctcgagatgaccaacatcgacggcaagtcccagttcgtctcctacgagatgcagcgcaacctctccctcgagcacgccaagacctccgtcctcctcctcaacaaggtcgacctcctctgggacgacctcttcctcatcctccagttcgtctggcacacctccgtcgagcacttccagatccgcaacgtcaccttcggcggcaaggcctacctcgaccacaactccttcgactactccaacaccatcatgcgcaccatcaagctcgagcacgtccacttccgcgtcttctacatccagcaggacaagatctacctcctcctcaccaagatggacatcgagaacctcaccatctccaacgcccagatgccccacatgctcttccccaactaccccaccaagttccagtacctcaacttcgccaacaacatcctcaccgacgagctcttcaagcgcaccctccagctcccccacctcaagaccctcatcctcaacggcaacaagctcgagaccctctccctcgtctcctgcttcgccaacaacacccccctcgagcacctcgacctctcccagaacctcctccagcacaagaacgacgagaactgctcctggcccgagaccgtcgtcaacatgaacctctcctacaacaagctctccgactccgtcttccgctgcctccccaagtccatccagatcctcgacctcaacaacaaccagatccagaccgtccccaaggagaccatccacctcatggccctccgcgagctcaacatcgccttcaacttcctcaccgacctccccggctgctcccacttctcccgcctctccgtcctcaacatcgagatgaacttcatcctctccccctccctcgacttcgtccagtcctgccaggaggtcaagaccctcaacgccggccgcaaccccttccgctgcacctgcgagctcaagaacttcatccagctcgagacctactccgaggtcatgatggtcggctggtccgactcctacacctgcgagtaccccctcaacctccgcggcacccgcctcaaggacgtccacctccacgagctctcctgcaacaccgccctcctcatcgtcaccatcgtcgtcatcatgctcgtcctcggcctcgccgtcgccttctgctgcctccacttcgacctcccctggtacctccgcatgctcggccagtgcacccagacctggcaccgcgtccgcaagaccacccaggagcagctcaagcgcaacgtccgcttccacgccttcatctcctactccgagcacgactccctctgggtcaagaacgagctcatccccaacctcgagaaggaggacggctccatcctcatctgcctctacgagtcctacttcgaccccggcaagtccatctccgagaacatcgtctccttcatcgagaagtcctacaagtccatcttcgtcctctcccccaacttcgtccagaacgagtggtgccactacgagttctacttcgcccaccacaacctcttccacgagaactccgaccacatcatcctcatcctcctcgagcccatccccttctactgcatccccacccgctaccacaagctcaaggccctcctcgagaagaaggcctacctcgagtggcccaaggaccgccgcaagtgcggcctcttctgggccaacctccgcgccgccatcaacgtcaacgtcctcgccacccgcgagatgtacgagctccagaccttcaccgagctcaacgaggagtcccgcggctccaccatctccctcatgcgcaccgactgcctctga

SEQ ID NO: 9491 - RNA, 2436 nt, synthetic construct
  misc_feature 1..2436: note = derived and/or modified sequence opt3 fromTLR10__Homo_sapiens__AAY78487
  source 1..2436: mol_type = other RNA
atgagactgatcaggaacatttacatattctgcagcatcgtgatgaccgccgagggcgacgctcccgaactccctgaggaacgggagcttatgacaaattgttccaacatgtctctgcgcaaggtcccagcagatttgactccggccacgaccacattagacctgtcatataatctactctttcagctgcaaagtagcgatttccactccgtttctaaacttcgagtgctgattttgtgccataaccgtatccagcagctcgacctgaagacttttgaatttaataaagagctgagatacctcgatttatcgaacaataggctgaagtcagtaacctggtatcttttggcggggctgcggtacctagacctcagcttcaacgatttcgacacaatgcccatttgtgaggaagctggaaatatgagtcacctggagatccttggtctgtccggcgccaaaatacagaagtctgattttcaaaagatcagccatttgcacctcaacaccgtgttcctggggtttcgcactttacctcattatgaagagggatccctgccaattctcaatacaaccaaacttcacatcgtcctgcccatggacacgaacttctgggtgttgctaagagatggcattaagacttcaaaaatcctggagatgaccaatatagacggtaagagtcagtttgttagctacgaaatgcagaggaacctctctctggagcacgcaaaaacatccgtgcttctgttgaataaggtcgatctcctgtgggacgacttattcctgattctacagtttgtgtggcatacttcagtagaacacttccaaatccggaacgttaccttcgggggaaaggcctatctcgatcataacagctttgactacagtaatacaattatgcgcaccatcaaactggagcacgtgcacttccgagtcttttacatccagcaggataagatttatcttttgctgacgaaaatggacatagaaaacctcactatctctaatgctcagatgcctcatatgctgttcccaaactaccccacaaagtttcaatatcttaatttcgcaaacaatattctgaccgatgagttgtttaaaagaactctccagctgcctcacttaaagacactgatcctaaacggcaataaactcgagaccctgtcccttgtgagctgcttcgccaacaatacgccattggaacatctggacctctcgcagaacctgttacaacacaagaatgatgagaactgttcttggccggaaaccgtggtcaatatgaacctgtcctacaacaaactttcagacagtgtttttaggtgcttgcccaagagcatacagattctcgatctgaataacaatcagatccagacagtgcctaaggagactatccatctaatggctctgcgggaactcaacattgccttcaattttctgaccgaccttccaggctgttcccacttctctcgtttgagcgtactgaacatcgagatgaattttattttatcacccagtctcgatttcgtgcaatcctgccaggaggtcaaaacactgaacgcggggcgcaatcctttcagatgtacttgcgaacttaagaactttatacagctggagacctatagcgaagtgatgatggttggatggtctgactcatacacatgtgagtatccattgaatctcaggggtacccggctgaaagacgtgcacctacatgaactgagttgcaacactgcactcctgatcgtcacgattgtggtaatcatgcttgttttgggcctggccgtggctttctgctgtttacactttgatctcccctggtacctgcgaatgcttgggcagtgcacacaaacctggcatcgcgtcagaaagactacccaggagcagctgaagaggaatgtgcggttccacgcctttatcagctactccgagcacgactctctatgggtcaaaaacgaactcattccgaatctggagaaggaagatggatcgatattgatctgtctgtatgagagctacttcgaccctggcaaatccatttcagagaacatcgtgagttttattgaaaagtcttataaaagcatcttcgttttatcccccaactttgtgcagaatgagtggtgccattacgagttctattttgcacaccataacctcttccacgaaaattcagatcatataatcctgattcttctggaaccaatccctttttactgtattcccacacgctatcacaagttgaaggctctcctggagaaaaaggcctacctagagtggccaaaagacagaaggaagtgcggtctgttctgggcgaaccttcgtgccgcaatcaatgtaaacgtcctcgctacccgggaaatgtacgagctgcaaactttcacagaattgaatgaggaaagccgagggtctacgatatccctgatgagaaccgattgtttatga

SEQ ID NO: 9492 - RNA, 2436 nt, synthetic construct
  misc_feature 1..2436: note = derived and/or modified sequence opt4 fromTLR10__Homo_sapiens__AAY78487
  source 1..2436: mol_type = other RNA
atgagactgatcagaaacatctacatcttctgcagcatcgtgatgaccgccgagggcgacgcccccgagctgcccgaggagagagagctgatgaccaactgcagcaacatgagcctgagaaaggtgcccgccgacctgacccccgccaccaccaccctggacctgagctacaacctgctgttccagctgcagagcagcgacttccacagcgtgagcaagctgagagtgctgatcctgtgccacaacagaatccagcagctggacctgaagaccttcgagttcaacaaggagctgagatacctggacctgagcaacaacagactgaagagcgtgacctggtacctgctggccggcctgagatacctggacctgagcttcaacgacttcgacaccatgcccatctgcgaggaggccggcaacatgagccacctggagatcctgggcctgagcggcgccaagatccagaagagcgacttccagaagatcagccacctgcacctgaacaccgtgttcctgggcttcagaaccctgccccactacgaggagggcagcctgcccatcctgaacaccaccaagctgcacatcgtgctgcccatggacaccaacttctgggtgctgctgagagacggcatcaagaccagcaagatcctggagatgaccaacatcgacggcaagagccagttcgtgagctacgagatgcagagaaacctgagcctggagcacgccaagaccagcgtgctgctgctgaacaaggtggacctgctgtgggacgacctgttcctgatcctgcagttcgtgtggcacaccagcgtggagcacttccagatcagaaacgtgaccttcggcggcaaggcctacctggaccacaacagcttcgactacagcaacaccatcatgagaaccatcaagctggagcacgtgcacttcagagtgttctacatccagcaggacaagatctacctgctgctgaccaagatggacatcgagaacctgaccatcagcaacgcccagatgccccacatgctgttccccaactaccccaccaagttccagtacctgaacttcgccaacaacatcctgaccgacgagctgttcaagagaaccctgcagctgccccacctgaagaccctgatcctgaacggcaacaagctggagaccctgagcctggtgagctgcttcgccaacaacacccccctggagcacctggacctgagccagaacctgctgcagcacaagaacgacgagaactgcagctggcccgagaccgtggtgaacatgaacctgagctacaacaagctgagcgacagcgtgttcagatgcctgcccaagagcatccagatcctggacctgaacaacaaccagatccagaccgtgcccaaggagaccatccacctgatggccctgagagagctgaacatcgccttcaacttcctgaccgacctgcccggctgcagccacttcagcagactgagcgtgctgaacatcgagatgaacttcatcctgagccccagcctggacttcgtgcagagctgccaggaggtgaagaccctgaacgccggcagaaaccccttcagatgcacctgcgagctgaagaacttcatccagctggagacctacagcgaggtgatgatggtgggctggagcgacagctacacctgcgagtaccccctgaacctgagaggcaccagactgaaggacgtgcacctgcacgagctgagctgcaacaccgccctgctgatcgtgaccatcgtggtgatcatgctggtgctgggcctggccgtggccttctgctgcctgcacttcgacctgccctggtacctgagaatgctgggccagtgcacccagacctggcacagagtgagaaagaccacccaggagcagctgaagagaaacgtgagattccacgccttcatcagctacagcgagcacgacagcctgtgggtgaagaacgagctgatccccaacctggagaaggaggacggcagcatcctgatctgcctgtacgagagctacttcgaccccggcaagagcatcagcgagaacatcgtgagcttcatcgagaagagctacaagagcatcttcgtgctgagccccaacttcgtgcagaacgagtggtgccactacgagttctacttcgcccaccacaacctgttccacgagaacagcgaccacatcatcctgatcctgctggagcccatccccttctactgcatccccaccagataccacaagctgaaggccctgctggagaagaaggcctacctggagtggcccaaggacagaagaaagtgcggcctgttctgggccaacctgagagccgccatcaacgtgaacgtgctggccaccagagagatgtacgagctgcagaccttcaccgagctgaacgaggagagcagaggcagcaccatcagcctgatgagaaccgactgcctgtga

SEQ ID NO: 9493 - RNA, 2436 nt, synthetic construct
  misc_feature 1..2436: note = derived and/or modified sequence opt5 fromTLR10__Homo_sapiens__AAY78487
  source 1..2436: mol_type = other RNA
atgagactgatccggaacatttacatcttctgcagcattgtgatgaccgccgagggcgacgctcccgaactccctgaggaacgcgagctgatgacaaattgttccaacatgtctcttagaaaggtcccggccgatctgacgcccgcgaccacaaccctcgacctgagctataatcttctgtttcagctccaatcctctgatttccacagcgtttccaaactgcgggtgctgatcctctgccataaccgcattcagcagctggaccttaagacatttgagttcaataaagagctgagatacctcgatctgtctaacaatcggcttaagagcgtgacctggtatctgctcgctgggctgcgctacctggacctctcctttaacgatttcgacacaatgcctatctgtgaggaagccggaaatatgagccacctggagatccttggcctgtctggggccaaaattcagaagtccgattttcaaaagatcagccatctccacctgaacaccgtcttccttggatttagaacgctgccccattatgaagagggctctctccctattctgaataccacaaaactgcacatcgtgctccccatggacaccaacttctgggttctgcttcgggatgggattaagacatccaaaatcctggagatgaccaatattgacggaaagagccagtttgtgtcttacgaaatgcagcgcaacctctccctggagcacgctaaaacgagcgtccttctgctcaataaggtggatctgctgtgggacgacctcttcctgatccttcagtttgtttggcatacatccgtggaacacttccaaatcagaaacgtcaccttcggcggcaaggcctatctggatcataactcttttgactacagcaatacaattatgcggaccatcaaactcgagcacgtgcacttccgcgtgttttacattcagcaggataagatctatctgctgcttaccaaaatggacattgaaaacctcacaatctccaatgctcagatgcctcatatgctgttcccgaactaccccacgaagtttcaatatctgaatttcgccaacaatatcctcaccgatgagctgtttaaaagaacacttcagctgcctcacctcaagaccctgattctgaacgggaataaacttgagacactcagcctggtctcttgcttcgcgaacaatacgcccctggaacatctcgacctgtcccagaaccttctgcaacacaagaatgatgagaactgtagctggcctgaaaccgttgtgaatatgaacctctcttacaacaagctgagcgactccgtgtttcggtgcctgcccaaatctatccagattcttgatctcaataacaatcagatccagacagtcccgaaggagaccattcatctgatggccctgcgcgaactcaacatcgctttcaattttctgaccgaccttcctggatgtagccacttctccagactgagcgtgctcaacatcgagatgaattttattctgtctccctccctggatttcgttcaaagctgccaggaggtgaaaacacttaacgccggccggaatcctttcagatgtacctgcgaactcaagaactttatccagctggagacatattctgaagtcatgatggtggggtggtccgacagctacacgtgtgagtatcccctgaatctccgcggaacccggctgaaagacgttcaccttcatgaactgtcctgcaacacagctctcctgattgtgaccatcgtcgtgattatgctggtccttggcctggccgtggcgttctgctgtctccactttgatctgccctggtacctcagaatgctggggcagtgcacacaaacctggcatcgcgttcggaagacgacccaggagcagcttaagagaaatgtgcgcttccacgcctttatctcttacagcgagcacgactccctgtgggtcaaaaacgaactcattcctaatctggagaaggaagatggatctatcctgatctgtctttatgagagctacttcgacccgggcaaatccattagcgagaacatcgtgtcttttattgaaaagtcctataaaagcatcttcgttctgtctcccaactttgtgcagaatgagtggtgccattacgagttctattttgctcaccataacctcttccacgaaaattccgatcatattatcctgatcctcctggaacctattcccttttactgtatccctacacggtatcacaaacttaaggccctgctcgaaaagaaggcttacctggagtggcccaaagacagacgcaagtgcggcctgttctgggccaaccttcgggccgctattaatgtcaacgtgctggcgaccagagaaatgtacgagctccaaacattcaccgaactgaatgaggaaagccgcgggtctacgatcagcctcatgcggacagattgtctgtga

SEQ ID NO: 9494 - protein, 811 aa, synthetic construct [sequence omitted]

SEQ ID NO: 9495 - RNA, 2436 nt, synthetic construct
  misc_feature 1..2436: note = TLR10__Homo_sapiens__AAY78488
  source 1..2436: mol_type = other RNA
atgagactcatcagaaacatttacatattttgtagtatagttatgacagcagagggtgatgctccagagctgccagaagaaagggaactgatgaccaactgctccaacatgtctctaagaaaggttcccgcagacttgaccccagccacaacaacactggatttatcctataacctcctttttcaactccagagttcagattttcattctgtctccaaactgagagttttgattctatgccataacagaattcaacagctggatctcaaaacctttgaattcaacaaggagttaagatatttagatttgtctaataacagactgaagagtgtaacttggtatttactggcaggtctcaggtatttagatctttcttttaatgactttgacaccatgcctatctgtgaggaagctggcaacatgtcacacctggaaatcctaggtttgagtggggcaaaaatacaaaaatcagatttccagaaaatttctcatctgcatctaaatactgtcttcttaggattcagaactcttcctcattatgaagaaggtagcctgcccatcttaaacacaacaaaactgcacattgttttaccaatggacacaaatttctgggttcttttgcgtgatggaatcaagacttcaaaaatattagaaatgacaaatatagatggcaaaagccaatttgtaagttatgaaatgcaacgaaatcttagtttagaacatgctaagacatcggttctattgcttaataaagttgatttactctgggacgaccttttccttatcttacaatttgtttggcatacatcagtggaacactttcagatccgaaatgtgacttttggtggtaaggcttatcttgaccacaattcatttgactactcaaatactataatgagaactataaaattggagcatgtacatttcagagtgttttacattcaacaggataaaatctatttgcttttgaccaaaacggacatagaaaacctgacaatatcaaatgcacaaatgccacacatgcttttccctaattatcctacgaaattccaatatttaaattttgccaataatatcttaacagacgagttgtttaaaagaactctccaactgcctcacttgaaaactctcattttgaatggcaataaactggagacactttctttagtaagttgctttgctaacaacacacccttggaacacttggatctgagtcaaaatctattacaacataaaaatgatgaaaattgctcatggccagaaactgtggtcaatatgaatctgtcatacaataaattgtctgattctgtcttcaggtgcttgcccaaaagtattcaaatacttgacctaaataataaccaaatccaaactgtacctaaagagactattcatctgatggccttacgagaactaaatattgcatttaattttctaactgatctccctggatgcagtcatttcagtagactttcagttctgaacattgaaatgaacttcattctcagcccatctctggattttgttcagagctgccaggaagttaaaactctaaatgcgggaagaaatccattccggtgtacctgtgaattaaaaaatttcattcagcttgaaacatattcagaggtcatgatggttggatggtcagattcatacacctgtgaataccctttaaacctaaggggaactaggttaaaagacgttcatctccacgaattatcttgcaacacagctctgttgattgtcaccattgtggttattatgctagttctggggttggctgtggccttctgctgtctccactttgatctgccctggtatctcaggatgctaggtcaatgcacacaaacatggcacagggttaggaaaacaacccaagaacaactcaagagaaatgtccgattccacgcatttatttcatacagtgaacatgattctctgtgggtgaagaatgaattgatccccaatctagagaaggaagatggttctatcttgatttgcctttatgaaagctactttgaccctggcaaaagcattagtgaaaatattgtaagcttcattgagaaaagctataagtccatctttgttttgtctcccaactttgtccagaatgagtggtgccattatgaattctactttgcccaccacaatctcttccatgaaaattctgatcacataattcttatcttactggaacccattccattctattgcattcccaccaggtatcataaactgaaagctctcctggaaaaaaaagcatacttggaatggcccaaggataggcgtaaatgtgggcttttctgggcaaaccttcgagctgctattaatgttaatgtattagccaccagagaaatgtatgaactgcagacattcacagagttaaatgaagagtctcgaggttctacaatctctctgatgagaacagactgtctataa

SEQ ID NO: 9496 - RNA, 2436 nt, synthetic construct
  misc_feature 1..2436: note = derived and/or modified sequence opt1 fromTLR10__Homo_sapiens__AAY78488
  source 1..2436: mol_type = other RNA
atgcgcctgatccggaacatctacatcttctgcagcatcgtgatgaccgccgagggcgacgcccccgagctcccggaggagcgcgagctgatgaccaactgctccaacatgagcctgcggaaggtccccgcggacctcacgcccgccaccaccaccctggacctgtcctacaacctcctgttccagctgcagagctccgacttccacagcgtgtccaagctccgcgtgctgatcctgtgccacaaccggatccagcagctcgacctgaagacgttcgagttcaacaaggagctgcgctacctcgacctgagcaacaaccggctgaagtccgtcacctggtacctcctggccgggctgcgctacctcgacctgagcttcaacgacttcgacaccatgcccatctgcgaggaggccggcaacatgtcccacctggagatcctcgggctgagcggcgccaagatccagaagtccgacttccagaagatcagccacctccacctgaacaccgtgttcctggggttccggacgctgccgcactacgaggagggctccctccccatcctgaacaccaccaagctgcacatcgtgctccccatggacaccaacttctgggtcctgctgcgcgacggcatcaagacgagcaagatcctcgagatgaccaacatcgacgggaagtcccagttcgtgagctacgagatgcagcggaacctgtccctggagcacgcgaagaccagcgtgctcctgctgaacaaggtcgacctcctgtgggacgacctgttcctcatcctgcagttcgtgtggcacaccagcgtggagcacttccagatccgcaacgtcacgttcggcgggaaggcctacctggaccacaactccttcgactacagcaacaccatcatgcggaccatcaagctcgagcacgtgcacttccgcgtgttctacatccagcaggacaagatctacctgctgctgaccaagacggacatcgagaacctcaccatctccaacgcccagatgccccacatgctgttcccgaactaccccaccaagttccagtacctgaacttcgccaacaacatcctcaccgacgagctgttcaagcggacgctgcagctcccccacctgaagaccctgatcctcaacggcaacaagctggagaccctgagcctcgtctcctgcttcgcgaacaacacgcccctggagcacctggacctcagccagaacctgctgcagcacaagaacgacgagaactgctcctggccggagaccgtggtgaacatgaacctcagctacaacaagctgtccgacagcgtcttccgctgcctgcccaagtccatccagatcctcgacctgaacaacaaccagatccagaccgtgcccaaggagaccatccacctgatggccctccgggagctgaacatcgccttcaacttcctgaccgacctccccgggtgcagccacttctcccgcctgagcgtgctgaacatcgagatgaacttcatcctctccccgagcctggacttcgtccagtcctgccaggaggtgaagacgctgaacgccggccggaaccccttccgctgcacgtgcgagctcaagaacttcatccagctggagacctacagcgaggtgatgatggtcggctggtccgacagctacacgtgcgagtaccccctgaacctccgggggacccgcctgaaggacgtgcacctccacgagctgagctgcaacaccgccctgctgatcgtcaccatcgtggtgatcatgctcgtcctgggcctggcggtggccttctgctgcctccacttcgacctgccctggtacctgcgcatgctcgggcagtgcacccagacctggcaccgggtgcgcaagaccacccaggagcagctgaagcggaacgtccgcttccacgccttcatctcctacagcgagcacgactccctgtgggtgaagaacgagctcatcccgaacctggagaaggaggacggcagcatcctgatctgcctctacgagtcctacttcgaccccggcaagagcatctccgagaacatcgtgagcttcatcgagaagtcctacaagagcatcttcgtcctgtcccccaacttcgtgcagaacgagtggtgccactacgagttctacttcgcccaccacaacctgttccacgagaacagcgaccacatcatcctcatcctgctggagcccatcccgttctactgcatccccacccggtaccacaagctcaaggccctgctggagaagaaggcgtacctcgagtggcccaaggaccgccggaagtgcgggctgttctgggccaacctgcgcgccgccatcaacgtgaacgtcctcgccacccgggagatgtacgagctgcagacgttcaccgagctgaacgaggagtcccgcggcagcaccatctccctcatgcggaccgactgcctgtga

SEQ ID NO: 9497 - RNA, 2436 nt, synthetic construct
  misc_feature 1..2436: note = derived and/or modified sequence opt2 fromTLR10__Homo_sapiens__AAY78488
  source 1..2436: mol_type = other RNA
atgcgcctcatccgcaacatctacatcttctgctccatcgtcatgaccgccgagggcgacgcccccgagctccccgaggagcgcgagctcatgaccaactgctccaacatgtccctccgcaaggtccccgccgacctcacccccgccaccaccaccctcgacctctcctacaacctcctcttccagctccagtcctccgacttccactccgtctccaagctccgcgtcctcatcctctgccacaaccgcatccagcagctcgacctcaagaccttcgagttcaacaaggagctccgctacctcgacctctccaacaaccgcctcaagtccgtcacctggtacctcctcgccggcctccgctacctcgacctctccttcaacgacttcgacaccatgcccatctgcgaggaggccggcaacatgtcccacctcgagatcctcggcctctccggcgccaagatccagaagtccgacttccagaagatctcccacctccacctcaacaccgtcttcctcggcttccgcaccctcccccactacgaggagggctccctccccatcctcaacaccaccaagctccacatcgtcctccccatggacaccaacttctgggtcctcctccgcgacggcatcaagacctccaagatcctcgagatgaccaacatcgacggcaagtcccagttcgtctcctacgagatgcagcgcaacctctccctcgagcacgccaagacctccgtcctcctcctcaacaaggtcgacctcctctgggacgacctcttcctcatcctccagttcgtctggcacacctccgtcgagcacttccagatccgcaacgtcaccttcggcggcaaggcctacctcgaccacaactccttcgactactccaacaccatcatgcgcaccatcaagctcgagcacgtccacttccgcgtcttctacatccagcaggacaagatctacctcctcctcaccaagaccgacatcgagaacctcaccatctccaacgcccagatgccccacatgctcttccccaactaccccaccaagttccagtacctcaacttcgccaacaacatcctcaccgacgagctcttcaagcgcaccctccagctcccccacctcaagaccctcatcctcaacggcaacaagctcgagaccctctccctcgtctcctgcttcgccaacaacacccccctcgagcacctcgacctctcccagaacctcctccagcacaagaacgacgagaactgctcctggcccgagaccgtcgtcaacatgaacctctcctacaacaagctctccgactccgtcttccgctgcctccccaagtccatccagatcctcgacctcaacaacaaccagatccagaccgtccccaaggagaccatccacctcatggccctccgcgagctcaacatcgccttcaacttcctcaccgacctccccggctgctcccacttctcccgcctctccgtcctcaacatcgagatgaacttcatcctctccccctccctcgacttcgtccagtcctgccaggaggtcaagaccctcaacgccggccgcaaccccttccgctgcacctgcgagctcaagaacttcatccagctcgagacctactccgaggtcatgatggtcggctggtccgactcctacacctgcgagtaccccctcaacctccgcggcacccgcctcaaggacgtccacctccacgagctctcctgcaacaccgccctcctcatcgtcaccatcgtcgtcatcatgctcgtcctcggcctcgccgtcgccttctgctgcctccacttcgacctcccctggtacctccgcatgctcggccagtgcacccagacctggcaccgcgtccgcaagaccacccaggagcagctcaagcgcaacgtccgcttccacgccttcatctcctactccgagcacgactccctctgggtcaagaacgagctcatccccaacctcgagaaggaggacggctccatcctcatctgcctctacgagtcctacttcgaccccggcaagtccatctccgagaacatcgtctccttcatcgagaagtcctacaagtccatcttcgtcctctcccccaacttcgtccagaacgagtggtgccactacgagttctacttcgcccaccacaacctcttccacgagaactccgaccacatcatcctcatcctcctcgagcccatccccttctactgcatccccacccgctaccacaagctcaaggccctcctcgagaagaaggcctacctcgagtggcccaaggaccgccgcaagtgcggcctcttctgggccaacctccgcgccgccatcaacgtcaacgtcctcgccacccgcgagatgtacgagctccagaccttcaccgagctcaacgaggagtcccgcggctccaccatctccctcatgcgcaccgactgcctctga

SEQ ID NO: 9498 - RNA, 2436 nt, synthetic construct
  misc_feature 1..2436: note = derived and/or modified sequence opt3 fromTLR10__Homo_sapiens__AAY78488
  source 1..2436: mol_type = other RNA
atgagactgatcaggaacatttacatattctgcagcatcgtgatgaccgccgagggcgacgctcccgaactccctgaggaacgggagcttatgacaaattgttccaacatgtctctgcgcaaggtcccagcagatttgactccggccacgaccacattagacctgtcatataatctactctttcagctgcaaagtagcgatttccactccgtttctaaacttcgagtgctgattttgtgccataaccgtatccagcagctcgacctgaagacttttgaatttaataaagagctgagatacctcgatttatcgaacaataggctgaagtcagtaacctggtatcttttggcggggctgcggtacctagacctcagcttcaacgatttcgacacaatgcccatttgtgaggaagctggaaatatgagtcacctggagatccttggtctgtccggcgccaaaatacagaagtctgattttcaaaagatcagccatttgcacctcaacaccgtgttcctggggtttcgcactttacctcattatgaagagggatccctgccaattctcaatacaaccaaacttcacatcgtcctgcccatggacacgaacttctgggtgttgctaagagatggcattaagacttcaaaaatcctggagatgaccaatatagacggtaagagtcagtttgttagctacgaaatgcagaggaacctctctctggagcacgcaaaaacatccgtgcttctgttgaataaggtcgatctcctgtgggacgacttattcctgattctacagtttgtgtggcatacttcagtagaacacttccaaatccggaacgttaccttcgggggaaaggcctatctcgatcataacagctttgactacagtaatacaattatgcgcaccatcaaactggagcacgtgcacttccgagtcttttacatccagcaggataagatttatcttttgctgacgaaaactgacatagaaaacctcacaatctctaatgctcagatgcctcatatgctgttcccaaactaccccaccaagtttcaatatcttaatttcgcaaacaatattctgactgatgagttgtttaaaagaacactccagctgcctcacttaaagaccctgatcctaaacggcaataaactcgagacgctgtcccttgtgagctgcttcgccaacaataccccattggaacatctggacctctcgcagaacctgttacaacacaagaatgatgagaactgttcttggccggaaacagtggtcaatatgaacctgtcctacaacaaactttcagacagtgtttttaggtgcttgcccaagagcatacagattctcgatctgaataacaatcagatccagactgtgcctaaggagaccatccatctaatggctctgcgggaactcaacattgccttcaattttctgacagaccttccaggctgttcccacttctctcgtttgagcgtactgaacatcgagatgaattttattttatcacccagtctcgatttcgtgcaatcctgccaggaggtcaaaactctgaacgcggggcgcaatcctttcagatgtacctgcgaacttaagaactttatacagctggagacatatagcgaagtgatgatggttggatggtctgactcatacacctgtgagtatccattgaatctcaggggtactcggctgaaagacgtgcacctacatgaactgagttgcaacacggcactcctgatcgtcacaattgtggtaatcatgcttgttttgggcctggccgtggctttctgctgtttacactttgatctcccctggtacctgcgaatgcttgggcagtgcacccaaacttggcatcgcgtcagaaagaccacacaggagcagctgaagaggaatgtgcggttccacgcctttatcagctactccgagcacgactctctatgggtcaaaaacgaactcattccgaatctggagaaggaagatggatcgatattgatctgtctgtatgagagctacttcgaccctggcaaatccatttcagagaacatcgtgagttttattgaaaagtcttataaaagcatcttcgttttatcccccaactttgtgcagaatgagtggtgccattacgagttctattttgcacaccataacctcttccacgaaaattcagatcatataatcctgattcttctggaaccaatccctttttactgtattcccacccgctatcacaagttgaaggctctcctggagaaaaaggcctacctagagtggccaaaagacagaaggaagtgcggtctgttctgggcgaaccttcgtgccgcaatcaatgtaaacgtcctcgctactcgggaaatgtacgagctgcaaacattcacggaattgaatgaggaaagccgagggtctaccatatccctgatgagaactgattgtttatga

SEQ ID NO: 9499 - RNA, 2436 nt, synthetic construct
  misc_feature 1..2436: note = derived and/or modified sequence opt4 fromTLR10__Homo_sapiens__AAY78488
  source 1..2436: mol_type = other RNA
atgagactgatcagaaacatctacatcttctgcagcatcgtgatgaccgccgagggcgacgcccccgagctgcccgaggagagagagctgatgaccaactgcagcaacatgagcctgagaaaggtgcccgccgacctgacccccgccaccaccaccctggacctgagctacaacctgctgttccagctgcagagcagcgacttccacagcgtgagcaagctgagagtgctgatcctgtgccacaacagaatccagcagctggacctgaagaccttcgagttcaacaaggagctgagatacctggacctgagcaacaacagactgaagagcgtgacctggtacctgctggccggcctgagatacctggacctgagcttcaacgacttcgacaccatgcccatctgcgaggaggccggcaacatgagccacctggagatcctgggcctgagcggcgccaagatccagaagagcgacttccagaagatcagccacctgcacctgaacaccgtgttcctgggcttcagaaccctgccccactacgaggagggcagcctgcccatcctgaacaccaccaagctgcacatcgtgctgcccatggacaccaacttctgggtgctgctgagagacggcatcaagaccagcaagatcctggagatgaccaacatcgacggcaagagccagttcgtgagctacgagatgcagagaaacctgagcctggagcacgccaagaccagcgtgctgctgctgaacaaggtggacctgctgtgggacgacctgttcctgatcctgcagttcgtgtggcacaccagcgtggagcacttccagatcagaaacgtgaccttcggcggcaaggcctacctggaccacaacagcttcgactacagcaacaccatcatgagaaccatcaagctggagcacgtgcacttcagagtgttctacatccagcaggacaagatctacctgctgctgaccaagaccgacatcgagaacctgaccatcagcaacgcccagatgccccacatgctgttccccaactaccccaccaagttccagtacctgaacttcgccaacaacatcctgaccgacgagctgttcaagagaaccctgcagctgccccacctgaagaccctgatcctgaacggcaacaagctggagaccctgagcctggtgagctgcttcgccaacaacacccccctggagcacctggacctgagccagaacctgctgcagcacaagaacgacgagaactgcagctggcccgagaccgtggtgaacatgaacctgagctacaacaagctgagcgacagcgtgttcagatgcctgcccaagagcatccagatcctggacctgaacaacaaccagatccagaccgtgcccaaggagaccatccacctgatggccctgagagagctgaacatcgccttcaacttcctgaccgacctgcccggctgcagccacttcagcagactgagcgtgctgaacatcgagatgaacttcatcctgagccccagcctggacttcgtgcagagctgccaggaggtgaagaccctgaacgccggcagaaaccccttcagatgcacctgcgagctgaagaacttcatccagctggagacctacagcgaggtgatgatggtgggctggagcgacagctacacctgcgagtaccccctgaacctgagaggcaccagactgaaggacgtgcacctgcacgagctgagctgcaacaccgccctgctgatcgtgaccatcgtggtgatcatgctggtgctgggcctggccgtggccttctgctgcctgcacttcgacctgccctggtacctgagaatgctgggccagtgcacccagacctggcacagagtgagaaagaccacccaggagcagctgaagagaaacgtgagattccacgccttcatcagctacagcgagcacgacagcctgtgggtgaagaacgagctgatccccaacctggagaaggaggacggcagcatcctgatctgcctgtacgagagctacttcgaccccggcaagagcatcagcgagaacatcgtgagcttcatcgagaagagctacaagagcatcttcgtgctgagccccaacttcgtgcagaacgagtggtgccactacgagttctacttcgcccaccacaacctgttccacgagaacagcgaccacatcatcctgatcctgctggagcccatccccttctactgcatccccaccagataccacaagctgaaggccctgctggagaagaaggcctacctggagtggcccaaggacagaagaaagtgcggcctgttctgggccaacctgagagccgccatcaacgtgaacgtgctggccaccagagagatgtacgagctgcagaccttcaccgagctgaacgaggagagcagaggcagcaccatcagcctgatgagaaccgactgcctgtga

SEQ ID NO: 9500 - RNA, 2436 nt, synthetic construct
  misc_feature 1..2436: note = derived and/or modified sequence opt5 fromTLR10__Homo_sapiens__AAY78488
  source 1..2436: mol_type = other RNA
atgagactgatccggaacatttacatcttctgcagcattgtgatgaccgccgagggcgacgctcccgaactccctgaggaacgcgagctgatgacaaattgttccaacatgtctcttagaaaggtcccggccgatctgacgcccgcgaccacaaccctcgacctgagctataatcttctgtttcagctccaatcctctgatttccacagcgtttccaaactgcgggtgctgatcctctgccataaccgcattcagcagctggaccttaagacatttgagttcaataaagagctgagatacctcgatctgtctaacaatcggcttaagagcgtgacctggtatctgctcgctgggctgcgctacctggacctctcctttaacgatttcgacacaatgcctatctgtgaggaagccggaaatatgagccacctggagatccttggcctgtctggggccaaaattcagaagtccgattttcaaaagatcagccatctccacctgaacaccgtcttccttggatttagaacgctgccccattatgaagagggctctctccctattctgaataccacaaaactgcacatcgtgctccccatggacaccaacttctgggttctgcttcgggatgggattaagacatccaaaatcctggagatgaccaatattgacggaaagagccagtttgtgtcttacgaaatgcagcgcaacctctccctggagcacgctaaaacgagcgtccttctgctcaataaggtggatctgctgtgggacgacctcttcctgatccttcagtttgtttggcatacatccgtggaacacttccaaatcagaaacgtcaccttcggcggcaaggcctatctggatcataactcttttgactacagcaatacaattatgcggaccatcaaactcgagcacgtgcacttccgcgtgttttacattcagcaggataagatctatctgctgcttaccaaaacagacattgaaaacctcacgatctccaatgctcagatgcctcatatgctgttcccgaactaccccaccaagtttcaatatctgaatttcgccaacaatatcctcacagatgagctgtttaaaagaacccttcagctgcctcacctcaagacactgattctgaacgggaataaacttgagaccctcagcctggtctcttgcttcgcgaacaatacgcccctggaacatctcgacctgtcccagaaccttctgcaacacaagaatgatgagaactgtagctggcctgaaacagttgtgaatatgaacctctcttacaacaagctgagcgactccgtgtttcggtgcctgcccaaatctatccagattcttgatctcaataacaatcagatccagaccgtcccgaaggagaccattcatctgatggccctgcgcgaactcaacatcgctttcaattttctgacagaccttcctggatgtagccacttctccagactgagcgtgctcaacatcgagatgaattttattctgtctccctccctggatttcgttcaaagctgccaggaggtgaaaacccttaacgccggccggaatcctttcagatgtacatgcgaactcaagaactttatccagctggagacgtattctgaagtcatgatggtggggtggtccgacagctacacctgtgagtatcccctgaatctccgcggaacacggctgaaagacgttcaccttcatgaactgtcctgcaacaccgctctcctgattgtgacaatcgtcgtgattatgctggtccttggcctggccgtggcgttctgctgtctccactttgatctgccctggtacctcagaatgctggggcagtgcacccaaacgtggcatcgcgttcggaagaccacacaggagcagcttaagagaaatgtgcgcttccacgcctttatctcttacagcgagcacgactccctgtgggtcaaaaacgaactcattcctaatctggagaaggaagatggatctatcctgatctgtctttatgagagctacttcgacccgggcaaatccattagcgagaacatcgtgtcttttattgaaaagtcctataaaagcatcttcgttctgtctcccaactttgtgcagaatgagtggtgccattacgagttctattttgctcaccataacctcttccacgaaaattccgatcatattatcctgatcctcctggaacctattcccttttactgtatccctacccggtatcacaaacttaaggccctgctcgaaaagaaggcttacctggagtggcccaaagacagacgcaagtgcggcctgttctgggccaaccttcgggccgctattaatgtcaacgtgctggcgacaagagaaatgtacgagctccaaaccttcacggaactgaatgaggaaagccgcgggtctacaatcagcctcatgcggaccgattgtctgtga

SEQ ID NO: 9501 - protein, 811 aa, synthetic construct; identical to SEQ ID NO: 9438
  REGION 1..811: note = TLR10__Homo_sapiens__Q9BXR5

SEQ ID NO: 9502 - RNA, 2436 nt, synthetic construct; identical to SEQ ID NO: 9439
  misc_feature 1..2436: note = TLR10__Homo_sapiens__AAH89406
  source 1..2436: mol_type = other RNA

SEQ ID NO: 9503 - RNA, 2436 nt, synthetic construct; identical to SEQ ID NO: 9440
  misc_feature 1..2436: note = derived and/or modified sequence opt1 fromTLR10__Homo_sapiens__AAH89406
  source 1..2436: mol_type = other RNA

SEQ ID NO: 9504 - RNA, 2436 nt, synthetic construct; identical to SEQ ID NO: 9441
  misc_feature 1..2436: note = derived and/or modified sequence opt2 fromTLR10__Homo_sapiens__AAH89406
  source 1..2436: mol_type = other RNA

SEQ ID NO: 9505 - RNA, 2436 nt, synthetic construct; identical to SEQ ID NO: 9442
  misc_feature 1..2436: note = derived and/or modified sequence opt3 fromTLR10__Homo_sapiens__AAH89406
  source 1..2436: mol_type = other RNA

SEQ ID NO: 9506 - RNA, 2436 nt, synthetic construct; identical to SEQ ID NO: 9443
  misc_feature 1..2436: note = derived and/or modified sequence opt4 fromTLR10__Homo_sapiens__AAH89406
  source 1..2436: mol_type = other RNA

SEQ ID NO: 9507 - RNA, 2436 nt, synthetic construct; identical to SEQ ID NO: 9444
  misc_feature 1..2436: note = derived and/or modified sequence opt5 fromTLR10__Homo_sapiens__AAH89406
  source 1..2436: mol_type = other RNA

SEQ ID NO: 9508 - protein, 786 aa, synthetic construct
  REGION 1..786: note = TLR1__Homo_sapiens__D1CS34
MTSIFHFAIIFMLILQIRIQLSEESEFLVDRSKNGLIHVPKDLSQKTTILNISQNYISELWTSDILSLSKLRILIISHNRIQYLDISVFKFNQELEYLDLSHNKLVKISCHPTVNLKHLDLSFNAFDALPICKEFGNMSQLKFLGLSTTHLEKSSVLPIAHLNISKVLLVLGETYGEKEDPEGLQDFNTESLHIVFPTNKEFHFILDVSVKTVANLELSNIKCVLEDNKCSYFLSILAKLQTNPKLSSLTLNNIETTWNSFIRILQLVWHTTVWYFSISNVKLQGQLDFRDFDYSGTSLKALSIHQVVSDVFGFPQSYIYEIFSNMNIKNFTVSGTRMVHMLCPSKISPFLHLDFSNNLLTDTVFENCGHLTELETLILQMNQLKELSKIAEMTTQMKSLQQLDISQNSVSYDEKKGDCSWTKSLLSLNMSSNILTDTIFRCLPPRIKVLDLHSNKIKSIPKQVVKLEALQELNVAFNSLTDLPGCGSFSSLSVLIIDHNSVSHPSADFFQSCQKMRSIKAGDNPFQCTCELGEFVKNIDQVSSEVLEGWPDSYKCDYPESYRGTLLKDFHMSELSCNITLLIVTIVATMLVLAVTVTSLCIYLDLPWYLRMVCQWTQTRRRARNIPLEELQRNLQFHAFISYSGHDSFWVKNELLPNLEKEGMQICLHERNFVPGKSIVENIITCIEKSYKSIFVLSPNFVQSEWCHYELYFAHHNLFHEGSNSLILILLEPIPQYSIPSSYHKLKSLMARRTYLEWPKEKSKRGLFWANLRAAINIKLTEQAKK

SEQ ID NO: 9509 - RNA, 2361 nt, synthetic construct
  misc_feature 1..2361: note = TLR1__Homo_sapiens__AAY85633
  source 1..2361: mol_type = other RNA
atgactagcatcttccattttgccattatcttcatgttaatacttcagatcagaatacaattatctgaagaaagtgaatttttagttgataggtcaaaaaacggtctcatccacgttcctaaagacctatcccagaaaacaacaatcttaaatatatcgcaaaattatatatctgagctttggacttctgacatcttatcactgtcaaaactgaggattttgataatttctcataatagaatccagtatcttgatatcagtgttttcaaattcaaccaggaattggaatacttggatttgtcccacaacaagttggtgaagatttcttgccaccctactgtgaacctcaagcacttggacctgtcatttaatgcatttgatgccctgcctatatgcaaagagtttggcaatatgtctcaactaaaatttctggggttgagcaccacacacttagaaaaatctagtgtgctgccaattgctcatttgaatatcagcaaggtcttgctggtcttaggagagacttatggggaaaaagaagaccctgagggccttcaagactttaacactgagagtctgcacattgtgttccccacaaacaaagaattccattttattttggatgtgtcagtcaagactgtagcaaatctggaactatctaatatcaaatgtgtgctagaagataacaaatgttcttacttcctaagtattctggcgaaacttcaaacaaatccaaagttatcaagtcttaccttaaacaacattgaaacaacttggaattctttcattaggatcctccagctggtttggcatacaactgtatggtatttctcaatttcaaacgtgaagctacagggtcagctggacttcagagattttgattattctggcacttccttgaaggccttgtctatacaccaagttgtcagcgatgtgttcggttttccgcaaagttatatctatgaaatcttttcgaatatgaacatcaaaaatttcacagtgtctggtacacgcatggtccacatgctttgcccatccaaaattagcccgttcctgcatttggatttttccaataatctcttaacagacacggtttttgaaaattgtgggcaccttactgagttggagacacttattttacaaatgaatcaattaaaagaactttcaaaaatagctgaaatgactacacagatgaagtctctgcaacaattggatattagccagaattctgtaagctatgatgaaaagaaaggagactgttcttggactaaaagtttattaagtttaaatatgtcttcaaatatacttactgacactattttcagatgtttacctcccaggatcaaggtacttgatcttcacagcaataaaataaagagcattcctaaacaagtcgtaaaactggaagctttgcaagaactcaatgttgctttcaattctttaactgaccttcctggatgtggcagctttagcagcctttctgtattgatcattgatcacaattcagtttcccacccatcagctgatttcttccagagctgccagaagatgaggtcaataaaagcaggggacaatccattccaatgtacctgtgagctaggagaatttgtcaaaaatatagaccaagtatcaagtgaagtgttagagggctggcctgattcttataagtgtgactacccggaaagttatagaggaaccctactaaaggactttcacatgtctgaattatcctgcaacataactctgctgatcgtcaccatcgttgccaccatgctggtgttggctgtgactgtgacctccctctgcatctacttggatctgccctggtatctcaggatggtgtgccagtggacccagacccggcgcagggccaggaacatacccttagaagaactccaaagaaatctccagtttcatgcatttatttcatatagtgggcacgattctttctgggtgaagaatgaattattgccaaacctagagaaagaaggtatgcagatttgccttcatgagagaaactttgttcctggcaagagcattgtggaaaatatcatcacctgcattgagaagagttacaagtccatctttgttttgtctcccaactttgtccagagtgaatggtgccattatgaactctactttgcccatcacaatctctttcatgaaggatctaatagcttaatcctgatcttgctggaacccattccgcagtactccattcctagcagttatcacaagctcaaaagtctcatggccaggaggacttatttggaatggcccaaggaaaagagcaaacgtggccttttttgggctaacttaagggcagccattaatattaagctgacagagcaagcaaagaaatag

SEQ ID NO: 9510 - RNA, 2361 nt, synthetic construct
  misc_feature 1..2361: note = derived and/or modified sequence opt1 fromTLR1__Homo_sapiens__AAY85633
  source 1..2361: mol_type = other RNA
atgaccagcatcttccacttcgccatcatcttcatgctgatcctccagatccgcatccagctgtccgaggagagcgagttcctggtggaccggtccaagaacggcctcatccacgtccccaaggacctgagccagaagaccacgatcctgaacatctcccagaactacatcagcgagctctggacctccgacatcctgagcctgtccaagctccgcatcctgatcatcagccacaaccggatccagtacctggacatctccgtgttcaagttcaaccaggagctcgagtacctggacctgagccacaacaagctcgtgaagatctcctgccacccgaccgtcaacctgaagcacctggacctcagcttcaacgccttcgacgcgctgcccatctgcaaggagttcgggaacatgtcccagctgaagttcctcggcctgagcaccacgcacctggagaagtccagcgtgctccccatcgcccacctgaacatctccaaggtgctgctcgtcctgggggagacctacggcgagaaggaggaccccgaggggctgcaggacttcaacaccgagagcctccacatcgtgttcccgaccaacaaggagttccacttcatcctggacgtgagcgtcaagacggtggccaacctggagctctccaacatcaagtgcgtgctggaggacaacaagtgcagctacttcctgtccatcctcgccaagctgcagaccaaccccaagctgagctccctcaccctgaacaacatcgagaccacgtggaacagcttcatccgcatcctgcagctcgtctggcacaccaccgtgtggtacttctccatcagcaacgtgaagctgcagggccagctggacttccgggacttcgactactccggcaccagcctcaaggccctgtccatccaccaggtcgtgagcgacgtgttcgggttcccccagtcctacatctacgagatcttcagcaacatgaacatcaagaacttcacggtctccggcacccgcatggtgcacatgctgtgccccagcaagatctccccgttcctccacctggacttcagcaacaacctgctgaccgacaccgtgttcgagaactgcgggcacctcacggagctggagaccctgatcctccagatgaaccagctgaaggagctgtccaagatcgcggagatgaccacccagatgaagtccctccagcagctggacatcagccagaacagcgtcagctacgacgagaagaagggcgactgctcctggaccaagagcctgctctccctgaacatgagctccaacatcctgaccgacaccatcttccggtgcctcccgccccgcatcaaggtgctggacctgcacagcaacaagatcaagtccatccccaagcaggtcgtgaagctcgaggccctgcaggagctgaacgtggccttcaacagcctcaccgacctgcccgggtgcggctccttcagctccctgagcgtcctcatcatcgaccacaactccgtgagccacccctccgccgacttcttccagagctgccagaagatgcggagcatcaaggcgggcgacaaccccttccagtgcacgtgcgagctgggggagttcgtgaagaacatcgaccaggtctccagcgaggtgctggagggctggcccgactcctacaagtgcgactacccggagagctaccgcgggaccctcctgaaggacttccacatgtccgagctgagctgcaacatcaccctcctgatcgtgaccatcgtcgccacgatgctggtgctcgccgtgaccgtcacctccctgtgcatctacctggacctcccctggtacctgcggatggtgtgccagtggacccagacgcgccggcgcgcccggaacatccccctggaggagctccagcgcaacctgcagttccacgccttcatcagctactccggccacgacagcttctgggtgaagaacgagctgctccccaacctggagaaggagggcatgcagatctgcctgcacgagcggaacttcgtcccggggaagtccatcgtggagaacatcatcacgtgcatcgagaagtcctacaagagcatcttcgtgctcagccccaacttcgtccagtccgagtggtgccactacgagctgtacttcgcgcaccacaacctgttccacgagggcagcaactccctcatcctgatcctgctcgagcccatcccccagtacagcatcccgtccagctaccacaagctcaagagcctgatggcccgccggacctacctggagtggcccaaggagaagtccaagcgcgggctgttctgggccaacctgcgggccgccatcaacatcaagctcaccgagcaggcgaagaagtga

SEQ ID NO: 9511 - RNA, 2361 nt, synthetic construct
  misc_feature 1..2361: note = derived and/or modified sequence opt2 fromTLR1__Homo_sapiens__AAY85633
  source 1..2361: mol_type = other RNA
atgacctccatcttccacttcgccatcatcttcatgctcatcctccagatccgcatccagctctccgaggagtccgagttcctcgtcgaccgctccaagaacggcctcatccacgtccccaaggacctctcccagaagaccaccatcctcaacatctcccagaactacatctccgagctctggacctccgacatcctctccctctccaagctccgcatcctcatcatctcccacaaccgcatccagtacctcgacatctccgtcttcaagttcaaccaggagctcgagtacctcgacctctcccacaacaagctcgtcaagatctcctgccaccccaccgtcaacctcaagcacctcgacctctccttcaacgccttcgacgccctccccatctgcaaggagttcggcaacatgtcccagctcaagttcctcggcctctccaccacccacctcgagaagtcctccgtcctccccatcgcccacctcaacatctccaaggtcctcctcgtcctcggcgagacctacggcgagaaggaggaccccgagggcctccaggacttcaacaccgagtccctccacatcgtcttccccaccaacaaggagttccacttcatcctcgacgtctccgtcaagaccgtcgccaacctcgagctctccaacatcaagtgcgtcctcgaggacaacaagtgctcctacttcctctccatcctcgccaagctccagaccaaccccaagctctcctccctcaccctcaacaacatcgagaccacctggaactccttcatccgcatcctccagctcgtctggcacaccaccgtctggtacttctccatctccaacgtcaagctccagggccagctcgacttccgcgacttcgactactccggcacctccctcaaggccctctccatccaccaggtcgtctccgacgtcttcggcttcccccagtcctacatctacgagatcttctccaacatgaacatcaagaacttcaccgtctccggcacccgcatggtccacatgctctgcccctccaagatctcccccttcctccacctcgacttctccaacaacctcctcaccgacaccgtcttcgagaactgcggccacctcaccgagctcgagaccctcatcctccagatgaaccagctcaaggagctctccaagatcgccgagatgaccacccagatgaagtccctccagcagctcgacatctcccagaactccgtctcctacgacgagaagaagggcgactgctcctggaccaagtccctcctctccctcaacatgtcctccaacatcctcaccgacaccatcttccgctgcctccccccccgcatcaaggtcctcgacctccactccaacaagatcaagtccatccccaagcaggtcgtcaagctcgaggccctccaggagctcaacgtcgccttcaactccctcaccgacctccccggctgcggctccttctcctccctctccgtcctcatcatcgaccacaactccgtctcccacccctccgccgacttcttccagtcctgccagaagatgcgctccatcaaggccggcgacaaccccttccagtgcacctgcgagctcggcgagttcgtcaagaacatcgaccaggtctcctccgaggtcctcgagggctggcccgactcctacaagtgcgactaccccgagtcctaccgcggcaccctcctcaaggacttccacatgtccgagctctcctgcaacatcaccctcctcatcgtcaccatcgtcgccaccatgctcgtcctcgccgtcaccgtcacctccctctgcatctacctcgacctcccctggtacctccgcatggtctgccagtggacccagacccgccgccgcgcccgcaacatccccctcgaggagctccagcgcaacctccagttccacgccttcatctcctactccggccacgactccttctgggtcaagaacgagctcctccccaacctcgagaaggagggcatgcagatctgcctccacgagcgcaacttcgtccccggcaagtccatcgtcgagaacatcatcacctgcatcgagaagtcctacaagtccatcttcgtcctctcccccaacttcgtccagtccgagtggtgccactacgagctctacttcgcccaccacaacctcttccacgagggctccaactccctcatcctcatcctcctcgagcccatcccccagtactccatcccctcctcctaccacaagctcaagtccctcatggcccgccgcacctacctcgagtggcccaaggagaagtccaagcgcggcctcttctgggccaacctccgcgccgccatcaacatcaagctcaccgagcaggccaagaagtga

SEQ ID NO: 9512 - RNA, 2361 nt, synthetic construct
  misc_feature 1..2361: note = derived and/or modified sequence opt3 fromTLR1__Homo_sapiens__AAY85633
  source 1..2361: mol_type = other RNA
atgaccagcatcttccactttgccattatattcatgctgatcctccagattagaatccaactttccgaggaatctgagtttctggtggacaggtcaaagaacggcttgattcatgtccccaaagatttaagtcagaagacaactatcctgaatataagccagaactacatctccgaactatggacgtctgacattctctcgctgtcaaaacttcggatcctgattatcagccacaatcgcatacagtatttggatattagtgttttcaagtttaaccaagagctcgaatacctggacctgtcccataataaactcgtgaagatctcttgccaccctaccgtaaacttaaagcatctggatcttagcttcaatgcttttgacgcattgccaatttgtaaagagttcgggaacatgtcccagctgaagtttctaggactctcaacaactcacctggagaaaagtagcgtgcttccgatcgcccacctgaatatctctaaggtcttgctcgtgctgggtgaaacctatggcgagaaagaagatcccgaggggttacaggacttcaacacagagtccctgcatattgtttttcctaccaataaggagttccactttatactcgatgtgtcagtcaagactgtggcgaaccttgaactgagcaatatcaaatgcgtattggaagacaacaagtgtagttacttcctatctattctggctaaactccagacaaatccaaagctgtccagccttaccctgaacaacatcgagacgacttggaatagcttcatacgaattttgcaactcgtttggcataccacagtgtggtatttttctatctccaacgtcaaactgcagggacagttagatttccgtgactttgattactcaggcacttcactgaaggccctaagcatccaccaggtggtgtccgacgtcttcggttttccccaatcttatatttacgaaatcttcagcaatatgaacattaaaaattttaccgtttcagggacaagaatggtgcacatgctctgccctagtaagatatccccattcctgcatcttgactttagcaacaatttgctgaccgatacggtattcgagaactgtggacacctcactgagctggaaacacttatcctgcagatgaatcagttgaaggagctctctaaaattgcagaaatgaccactcaaatgaagtcactgcagcagttagacatcagtcagaacagcgtgtcctacgatgagaaaaagggcgactgctcttggacaaaatcgctgctaagcctcaatatgtcctcaaacatcctgaccgatacgatttttaggtgtcttccccctcggataaaggtcttggacctgcatagtaataagatcaaatctattccaaagcaagtggttaaactcgaagccctgcaggagttaaacgtggctttcaatagcctgaccgatcttccgggctgcgggtcctttagtagcttgtctgtcctcatcattgaccacaactccgtgagtcatcccagcgcagatttcttccagtcttgtcagaagatgcgctccatcaaagccggagacaacccttttcaatgcacatgtgagctgggtgagttcgtaaagaatatagatcaggtttcaagtgaagtgctagaaggctggccagacagctataagtgcgactaccccgagtcgtatagagggactctgctcaaagattttcacatgtccgaactgtcttgcaacatcacccttttgattgtcacaatcgtggctactatgctggtcttagccgtgaccgttacaagcctctgtatttacctggaccttccttggtatctgaggatggtgtgccagtggacccagactcggcgccgagcgagaaatatcccattggaggagctccaaaggaacctgcagttccacgcatttatatcatacagtggacatgattccttctgggtaaagaatgaactactgcccaacctcgagaaagaaggcatgcagatttgtctgcacgagcggaattttgtcccgggtaagtctatcgtggagaacattatcacgtgcatagaaaaatcgtataagtccatcttcgttctttcacctaattttgtgcagagcgagtggtgtcattacgaattgtacttcgcccaccacaacctgtttcatgaggggagtaattctttaattctcatcctgcttgaacccattccacaatattccatccctagctcgtaccacaagctgaaatcactaatggctcgtcgcacatatctcgagtggcccaaggagaaatctaagagaggactgttctgggccaacttgagggcagctataaatattaaactgaccgaacaggccaagaaatga

SEQ ID NO: 9513 - RNA, 2361 nt, synthetic construct
  misc_feature 1..2361: note = derived and/or modified sequence opt4 fromTLR1__Homo_sapiens__AAY85633
  source 1..2361: mol_type = other RNA
atgaccagcatcttccacttcgccatcatcttcatgctgatcctgcagatcagaatccagctgagcgaggagagcgagttcctggtggacagaagcaagaacggcctgatccacgtgcccaaggacctgagccagaagaccaccatcctgaacatcagccagaactacatcagcgagctgtggaccagcgacatcctgagcctgagcaagctgagaatcctgatcatcagccacaacagaatccagtacctggacatcagcgtgttcaagttcaaccaggagctggagtacctggacctgagccacaacaagctggtgaagatcagctgccaccccaccgtgaacctgaagcacctggacctgagcttcaacgccttcgacgccctgcccatctgcaaggagttcggcaacatgagccagctgaagttcctgggcctgagcaccacccacctggagaagagcagcgtgctgcccatcgcccacctgaacatcagcaaggtgctgctggtgctgggcgagacctacggcgagaaggaggaccccgagggcctgcaggacttcaacaccgagagcctgcacatcgtgttccccaccaacaaggagttccacttcatcctggacgtgagcgtgaagaccgtggccaacctggagctgagcaacatcaagtgcgtgctggaggacaacaagtgcagctacttcctgagcatcctggccaagctgcagaccaaccccaagctgagcagcctgaccctgaacaacatcgagaccacctggaacagcttcatcagaatcctgcagctggtgtggcacaccaccgtgtggtacttcagcatcagcaacgtgaagctgcagggccagctggacttcagagacttcgactacagcggcaccagcctgaaggccctgagcatccaccaggtggtgagcgacgtgttcggcttcccccagagctacatctacgagatcttcagcaacatgaacatcaagaacttcaccgtgagcggcaccagaatggtgcacatgctgtgccccagcaagatcagccccttcctgcacctggacttcagcaacaacctgctgaccgacaccgtgttcgagaactgcggccacctgaccgagctggagaccctgatcctgcagatgaaccagctgaaggagctgagcaagatcgccgagatgaccacccagatgaagagcctgcagcagctggacatcagccagaacagcgtgagctacgacgagaagaagggcgactgcagctggaccaagagcctgctgagcctgaacatgagcagcaacatcctgaccgacaccatcttcagatgcctgccccccagaatcaaggtgctggacctgcacagcaacaagatcaagagcatccccaagcaggtggtgaagctggaggccctgcaggagctgaacgtggccttcaacagcctgaccgacctgcccggctgcggcagcttcagcagcctgagcgtgctgatcatcgaccacaacagcgtgagccaccccagcgccgacttcttccagagctgccagaagatgagaagcatcaaggccggcgacaaccccttccagtgcacctgcgagctgggcgagttcgtgaagaacatcgaccaggtgagcagcgaggtgctggagggctggcccgacagctacaagtgcgactaccccgagagctacagaggcaccctgctgaaggacttccacatgagcgagctgagctgcaacatcaccctgctgatcgtgaccatcgtggccaccatgctggtgctggccgtgaccgtgaccagcctgtgcatctacctggacctgccctggtacctgagaatggtgtgccagtggacccagaccagaagaagagccagaaacatccccctggaggagctgcagagaaacctgcagttccacgccttcatcagctacagcggccacgacagcttctgggtgaagaacgagctgctgcccaacctggagaaggagggcatgcagatctgcctgcacgagagaaacttcgtgcccggcaagagcatcgtggagaacatcatcacctgcatcgagaagagctacaagagcatcttcgtgctgagccccaacttcgtgcagagcgagtggtgccactacgagctgtacttcgcccaccacaacctgttccacgagggcagcaacagcctgatcctgatcctgctggagcccatcccccagtacagcatccccagcagctaccacaagctgaagagcctgatggccagaagaacctacctggagtggcccaaggagaagagcaagagaggcctgttctgggccaacctgagagccgccatcaacatcaagctgaccgagcaggccaagaagtga

SEQ ID NO: 9514 - RNA, 2361 nt, synthetic construct
  misc_feature 1..2361: note = derived and/or modified sequence opt5 fromTLR1__Homo_sapiens__AAY85633
  source 1..2361: mol_type = other RNA
atgaccagcatcttccactttgccattatcttcatgctgattctccagatccggattcaactgtccgaggaatctgagtttcttgtggacagaagcaagaacggcctgatccatgtccccaaagatctctcccagaagacaacgatcctgaatatttctcagaactacatcagcgaactttggacctccgacattctgtctctcagcaaactgcgcatcctgattatctcccacaatagaatccagtatctcgatattagcgttttcaagtttaaccaagagctggaataccttgacctgtctcataataaactcgtgaagatctcctgccaccctacagtgaacctgaagcatcttgatctgagcttcaatgcttttgacgccctcccgatttgtaaagagttcgggaacatgtctcagctgaagtttctgggactctccaccacacacctggagaaaagctctgtccttcccatcgcgcacctgaatatttccaaggtgctcctggttcttggcgaaacctatggggagaaagaagatcctgagggactgcaggacttcaacacagagagcctccatatcgtgtttcccaccaataaggagttccactttattctggatgtctccgtgaagacggttgctaacctggaactctctaatatcaaatgcgtgctggaagacaacaagtgtagctacttcctttccatcctggccaaactccagaccaatcctaagctgagctctcttacactgaacaacattgagaccacatggaatagcttcatccggattctccaactggtctggcataccacggtgtggtattttagcatctctaacgtgaaactgcagggccagctcgatttccgcgactttgattacagcgggacatccctgaaggccctttctattcaccaggtcgttagcgacgtgttcggatttccccaatcctatatctacgaaatcttcagcaatatgaacattaaaaattttaccgtgtctggcacaagaatggtccacatgctgtgcccttccaagatcagcccgttcctccatctggacttttctaacaatctgcttaccgataccgtgttcgagaactgtggccacctcacagagctggaaacgctgattctccagatgaatcagctgaaggagctttccaaaatcgctgaaatgaccacacaaatgaagtccctgcagcagctcgacatttcccagaactctgttagctacgatgagaaaaagggggactgctcctggaccaaatctctgctgagccttaatatgtccagcaacatcctcacagataccatttttcggtgtctgccccctcgcatcaaggtgctggacctccattctaataagatcaaatccattcccaagcaagtcgtgaaactggaagcccttcaggagctgaacgttgctttcaatagcctcacggatctgcctggatgcggctctttttccagcctgtctgtgcttatcattgaccacaacagcgtctcccatcccagcgccgatttcttccagtcttgtcagaagatgagatccatcaaagcgggggacaacccgtttcaatgcacatgtgagctcggagagttcgtgaagaatattgatcaggtcagctccgaagtgctggaaggctggcctgactcttataagtgcgactaccccgagagctatcgggggaccctgctcaaagattttcacatgtccgaactgtcttgcaacatcacccttctgatcgttacaattgtggccaccatgctcgtcctggctgtgacagttacgagcctgtgtatctaccttgacctcccttggtatctgcgcatggtgtgccagtggacccagacaagacggcgcgccagaaatattcccctggaggagctccaacggaacctgcagttccacgcttttatctcctactctggacatgatagcttctgggtcaagaatgaacttctgcccaacctcgagaaagaaggcatgcagatttgtctgcacgagcgcaattttgtgcctggcaagtccatcgtggagaacatcattacctgcatcgaaaagagctataagtctattttcgttctgtccccgaattttgtccagagcgagtggtgtcattacgaactttacttcgcccaccacaacctgtttcatgaggggtctaattccctcatcctgattctcctggaacccatccctcaatatagcatcccctcttcctaccacaaacttaaaagcctgatggcgagacggacatatctcgagtggcctaaggagaaatccaagagaggactgttctgggccaacctgcgcgctgccattaatatcaaacttaccgaacaggctaagaaatga

SEQ ID NO: 9515 - protein, 786 aa, synthetic construct [sequence omitted]

SEQ ID NO: 9516 - RNA, 2361 nt, synthetic construct
  misc_feature 1..2361: note = TLR1__Homo_sapiens__AAY85634
  source 1..2361: mol_type = other RNA
atgactagcatcttccattttgccattatcttcatgttaatacttcagatcagaatacaattatctgaagaaagtgaatttttagttgataggtcaaaaaacggtctcatccacgttcctaaagacctatcccagaaaacaacaatcttaaatatatcgcaaaattatatatctgagctttggacttctgacatcttatcactgtcaaaactgaggattttgataatttctcataatagaatccagtatcttgatatcagtgttttcaaattcaaccaggaattggaatacttggatttgtcccacaacaagttggtgaagatttcttgccaccctactgtgaacctcaagcacttggacctgtcatttaatgcatttgatgccctgcctatatgcaaagagtttggcaatatgtctcaactaaaatttctggggttgagcaccacacacttagaaaaatctagtgtgctgccaattgctcatttgaatatcagcaaggtcttgctggtcttaggagagacttatggggaaaaagaagaccctgagggccttcaagactttaacactgagagtctgcacattgtgttccccacaaacaaagaattccattttattttggatgtgtcagtcaagactgtagcaaatctggaactatctaatatcaaatgtgtgctagaagataacaaatgttcttacttcctaagtattctggcgaaacttcaaacaaatccaaagttatcaagtcttaccttaaacaacattgaaacaacttggaattctttcattaggatcctccagctggtttggcatacaactgtatggtatttctcaatttcaaacgtgaagctacagggtcagctggacttcagagattttgattattctggcacttccttgaaggccttgtctatacaccaagttgtcagcgatgtgttcggttttccgcaaagttatatctatgaaatcttttcgaatatgaacatcaaaaatttcacagtgtctggtacacgcatggtccacatgctttgcccatccaaaattagcccgttcctgcatttggatttttccaataatctcttaacagacacggtttttgaaaattgtgggcaccttactgagttggagacacttattttacaaatgaatcaattaaaagaactttcaaaaatagctgaaatgactacacagatgaagtctctgcaacaattggatattagccagaattctgtaagctatgatgaaaagaaaggagactgttcttggactaaaagtttattaagtttaaatatgtcttcaaatatacttactgacactattttcagatgtttacctcccaggatcaaggtacttgatcttcacagcaataaaataaagagcattcctaaacaagtcgtaaaactggaagctttgcaagaactcaatgttgctttcaattctttaactgaccttcctggatgtggcagctttagcagcctttctgtattgatcattgatcacaattcagtttcccacccatcagctgatttcttccagagctgccagaagatgaggtcaataaaagcaggggacaatccattccaatgtacctgtgagctaggagaatttgtcaaaaatatagaccaagtatcaagtgaagtgttagagggctggcctgattcttataagtgtgactacccggaaagttatagaggaagcctactaaaggactttcacatgtctgaattatcctgcaacataactctgctgatcgtcaccatcgttgccaccatgctggtgttggctgtgactgtgacctccctctgcatctacttggatctgccctggtatctcaggatggtgtgccagtggacccagacccggcgcagggccaggaacatacccttagaagaactccaaagaaatctccagtttcatgcatttatttcatatagtgggcacgattctttctgggtgaagaatgaattattgccaaacctagagaaagaaggtatgcagatttgccttcatgagagaaactttgttcctggcaagagcattgtggaaaatatcatcacctgcattgagaagagttacaagtccatctttgttttgtctcccaactttgtccagagtgaatggtgccattatgaactctactttgcccatcacaatctctttcatgaaggatctaatagcttaatcctgatcttgctggaacccattccgcagtactccattcctagcagttatcacaagctcaaaagtctcatggccaggaggacttatttggaatggcccaaggaaaagagcaaacgtggccttttttgggctaacttaagggcagccattaatattaagctgacagagcaagcaaagaaatag

SEQ ID NO: 9517 - RNA, 2361 nt, synthetic construct
  misc_feature 1..2361: note = derived and/or modified sequence opt1 fromTLR1__Homo_sapiens__AAY85634
  source 1..2361: mol_type = other RNA
atgaccagcatcttccacttcgccatcatcttcatgctgatcctccagatccgcatccagctgagcgaggagagcgagttcctggtggaccggtccaagaacggcctcatccacgtccccaaggacctgagccagaagaccacgatcctgaacatctcccagaactacatcagcgagctctggacctccgacatcctgagcctgtccaagctccgcatcctgatcatcagccacaaccggatccagtacctggacatctccgtgttcaagttcaaccaggagctcgagtacctggacctgagccacaacaagctcgtgaagatctcctgccacccgaccgtcaacctgaagcacctggacctcagcttcaacgccttcgacgcgctgcccatctgcaaggagttcgggaacatgtcccagctgaagttcctcggcctgagcaccacgcacctggagaagtccagcgtgctccccatcgcccacctgaacatctccaaggtgctgctcgtcctgggggagacctacggcgagaaggaggaccccgaggggctgcaggacttcaacaccgagagcctccacatcgtgttcccgaccaacaaggagttccacttcatcctggacgtgagcgtcaagacggtggccaacctggagctctccaacatcaagtgcgtgctggaggacaacaagtgcagctacttcctgtccatcctcgccaagctgcagaccaaccccaagctgagctccctcaccctgaacaacatcgagaccacgtggaacagcttcatccgcatcctgcagctcgtctggcacaccaccgtgtggtacttctccatcagcaacgtgaagctgcagggccagctggacttccgggacttcgactactccggcaccagcctcaaggccctgtccatccaccaggtcgtgagcgacgtgttcgggttcccccagtcctacatctacgagatcttcagcaacatgaacatcaagaacttcacggtctccggcacccgcatggtgcacatgctgtgccccagcaagatctccccgttcctccacctggacttcagcaacaacctgctgaccgacaccgtgttcgagaactgcgggcacctcacggagctggagaccctgatcctccagatgaaccagctgaaggagctgtccaagatcgcggagatgaccacccagatgaagtccctccagcagctggacatcagccagaacagcgtcagctacgacgagaagaagggcgactgctcctggaccaagagcctgctctccctgaacatgagctccaacatcctgacggacaccatcttccggtgcctcccgccccgcatcaaggtgctggacctgcacagcaacaagatcaagtccatccccaagcaggtcgtgaagctcgaggccctgcaggagctgaacgtggccttcaacagcctcaccgacctgcccgggtgcggctccttcagctccctgagcgtcctcatcatcgaccacaactccgtgagccacccctccgccgacttcttccagagctgccagaagatgcggagcatcaaggcgggcgacaaccccttccagtgcacgtgcgagctgggggagttcgtgaagaacatcgaccaggtctccagcgaggtgctggagggctggcccgactcctacaagtgcgactacccggagagctaccgcgggtccctcctgaaggacttccacatgagcgagctgtcctgcaacatcaccctcctgatcgtgaccatcgtcgccaccatgctggtgctcgccgtgacggtcaccagcctgtgcatctacctggacctcccctggtacctgcggatggtgtgccagtggacccagacccgccggcgcgcccggaacatccccctggaggagctccagcgcaacctgcagttccacgccttcatctcctacagcggccacgactccttctgggtgaagaacgagctgctccccaacctggagaaggagggcatgcagatctgcctgcacgagcggaacttcgtcccgggcaagagcatcgtggagaacatcatcacgtgcatcgagaagtcctacaagagcatcttcgtgctctcccccaacttcgtccagagcgagtggtgccactacgagctgtacttcgcgcaccacaacctgttccacgaggggtccaacagcctcatcctgatcctgctcgagcccatcccccagtactccatcccgagcagctaccacaagctgaagtccctgatggcccgccggacctacctcgagtggcccaaggagaagtccaagcgcgggctgttctgggccaacctgcgggccgccatcaacatcaagctcaccgagcaggcgaagaagtga

SEQ ID NO: 9518 - RNA, 2361 nt, synthetic construct
  misc_feature 1..2361: note = derived and/or modified sequence opt2 fromTLR1__Homo_sapiens__AAY85634
  source 1..2361: mol_type = other RNA
atgacctccatcttccacttcgccatcatcttcatgctcatcctccagatccgcatccagctctccgaggagtccgagttcctcgtcgaccgctccaagaacggcctcatccacgtccccaaggacctctcccagaagaccaccatcctcaacatctcccagaactacatctccgagctctggacctccgacatcctctccctctccaagctccgcatcctcatcatctcccacaaccgcatccagtacctcgacatctccgtcttcaagttcaaccaggagctcgagtacctcgacctctcccacaacaagctcgtcaagatctcctgccaccccaccgtcaacctcaagcacctcgacctctccttcaacgccttcgacgccctccccatctgcaaggagttcggcaacatgtcccagctcaagttcctcggcctctccaccacccacctcgagaagtcctccgtcctccccatcgcccacctcaacatctccaaggtcctcctcgtcctcggcgagacctacggcgagaaggaggaccccgagggcctccaggacttcaacaccgagtccctccacatcgtcttccccaccaacaaggagttccacttcatcctcgacgtctccgtcaagaccgtcgccaacctcgagctctccaacatcaagtgcgtcctcgaggacaacaagtgctcctacttcctctccatcctcgccaagctccagaccaaccccaagctctcctccctcaccctcaacaacatcgagaccacctggaactccttcatccgcatcctccagctcgtctggcacaccaccgtctggtacttctccatctccaacgtcaagctccagggccagctcgacttccgcgacttcgactactccggcacctccctcaaggccctctccatccaccaggtcgtctccgacgtcttcggcttcccccagtcctacatctacgagatcttctccaacatgaacatcaagaacttcaccgtctccggcacccgcatggtccacatgctctgcccctccaagatctcccccttcctccacctcgacttctccaacaacctcctcaccgacaccgtcttcgagaactgcggccacctcaccgagctcgagaccctcatcctccagatgaaccagctcaaggagctctccaagatcgccgagatgaccacccagatgaagtccctccagcagctcgacatctcccagaactccgtctcctacgacgagaagaagggcgactgctcctggaccaagtccctcctctccctcaacatgtcctccaacatcctcaccgacaccatcttccgctgcctccccccccgcatcaaggtcctcgacctccactccaacaagatcaagtccatccccaagcaggtcgtcaagctcgaggccctccaggagctcaacgtcgccttcaactccctcaccgacctccccggctgcggctccttctcctccctctccgtcctcatcatcgaccacaactccgtctcccacccctccgccgacttcttccagtcctgccagaagatgcgctccatcaaggccggcgacaaccccttccagtgcacctgcgagctcggcgagttcgtcaagaacatcgaccaggtctcctccgaggtcctcgagggctggcccgactcctacaagtgcgactaccccgagtcctaccgcggctccctcctcaaggacttccacatgtccgagctctcctgcaacatcaccctcctcatcgtcaccatcgtcgccaccatgctcgtcctcgccgtcaccgtcacctccctctgcatctacctcgacctcccctggtacctccgcatggtctgccagtggacccagacccgccgccgcgcccgcaacatccccctcgaggagctccagcgcaacctccagttccacgccttcatctcctactccggccacgactccttctgggtcaagaacgagctcctccccaacctcgagaaggagggcatgcagatctgcctccacgagcgcaacttcgtccccggcaagtccatcgtcgagaacatcatcacctgcatcgagaagtcctacaagtccatcttcgtcctctcccccaacttcgtccagtccgagtggtgccactacgagctctacttcgcccaccacaacctcttccacgagggctccaactccctcatcctcatcctcctcgagcccatcccccagtactccatcccctcctcctaccacaagctcaagtccctcatggcccgccgcacctacctcgagtggcccaaggagaagtccaagcgcggcctcttctgggccaacctccgcgccgccatcaacatcaagctcaccgagcaggccaagaagtga

SEQ ID NO: 9519 - RNA, 2361 nt, synthetic construct
  misc_feature 1..2361: note = derived and/or modified sequence opt3 fromTLR1__Homo_sapiens__AAY85634
  source 1..2361: mol_type = other RNA
atgaccagcatcttccactttgccattatattcatgctgatcctccagattagaatccaactttccgaggaatctgagtttctggtggacaggtcaaagaacggcttgattcatgtccccaaagatttaagtcagaagacaactatcctgaatataagccagaactacatctccgaactatggacgtctgacattctctcgctgtcaaaacttcggatcctgattatcagccacaatcgcatacagtatttggatattagtgttttcaagtttaaccaagagctcgaatacctggacctgtcccataataaactcgtgaagatctcttgccaccctaccgtaaacttaaagcatctggatcttagcttcaatgcttttgacgcattgccaatttgtaaagagttcgggaacatgtcccagctgaagtttctaggactctcaacaactcacctggagaaaagtagcgtgcttccgatcgcccacctgaatatctctaaggtcttgctcgtgctgggtgaaacctatggcgagaaagaagatcccgaggggttacaggacttcaacacagagtccctgcatattgtttttcctaccaataaggagttccactttatactcgatgtgtcagtcaagactgtggcgaaccttgaactgagcaatatcaaatgcgtattggaagacaacaagtgtagttacttcctatctattctggctaaactccagacaaatccaaagctgtccagccttaccctgaacaacatcgagacgacttggaactcgttcatacgaattttgcaactcgtttggcataccacagtgtggtatttttctatctccaatgtcaaactgcagggacagttagatttccgtgactttgattactcaggcacttcactgaaggccctaagcatccaccaggtggtgtccgacgtcttcggttttccccaatcttatatttacgaaatcttcagcaatatgaacattaaaaattttaccgtttcagggacaagaatggtgcacatgctctgccctagtaagatatccccattcctgcatcttgactttagcaacaatttgctgaccgatacggtattcgagaactgtggacacctcactgagctggaaacacttatcctgcagatgaatcagttgaaggagctctctaaaattgcagaaatgaccactcaaatgaagtcactgcagcagttagacatcagtcagaacagcgtgtcctacgatgagaaaaagggcgactgctcttggacaaaatcgctgctaagcctcaatatgtcctcaaacatcctgaccgatacgatttttaggtgtcttccccctcggataaaggtcttggacctgcatagtaataagatcaaatctattccaaagcaagtggttaaactcgaagccctgcaggagttaaacgtggctttcaatagcctgaccgatcttccgggctgcgggtcctttagtagcttgtctgtcctcatcattgaccacaactccgtgagtcatcccagcgcagatttcttccagtcttgtcagaagatgcgctccatcaaagccggagacaacccttttcaatgcacatgtgagctgggtgagttcgtaaagaatatagatcaggtttcaagtgaagtgctagaaggctggccagacagctataagtgcgactaccccgagtcgtatagagggtccctgctcaaagattttcacatgtctgaactgagctgcaacatcactcttttgattgtcaccatcgtggctacaatgctggtcttagccgtgactgttacctcactctgtatttacctggaccttccttggtatctgaggatggtgtgccagtggacacagacccggcgccgagcgagaaatatcccattggaggagctccaaaggaacctgcagttccacgcatttataagttactccggacatgattctttctgggtaaagaatgaactactgcccaacctcgagaaagaaggcatgcagatttgtctgcacgagcggaattttgtcccgggtaagagcatcgtggagaacattatcacttgcatagaaaaatcctataagtcaatcttcgttcttagccctaattttgtgcagagtgagtggtgtcattacgaattgtacttcgcccaccacaacctgtttcatgaggggtctaattccttaattctcatcctgcttgaacccattccacaatatagcatcccttcgtcataccacaagctgaaatctctaatggctcgtcgcacgtatctcgagtggcccaaggagaaaagtaagagaggactgttctgggccaacttgagggcagctataaatattaaactgacagaacaggccaagaaatga

SEQ ID NO: 9520 - RNA, 2361 nt, synthetic construct
  misc_feature 1..2361: note = derived and/or modified sequence opt4 fromTLR1__Homo_sapiens__AAY85634
  source 1..2361: mol_type = other RNA
atgaccagcatcttccacttcgccatcatcttcatgctgatcctgcagatcagaatccagctgagcgaggagagcgagttcctggtggacagaagcaagaacggcctgatccacgtgcccaaggacctgagccagaagaccaccatcctgaacatcagccagaactacatcagcgagctgtggaccagcgacatcctgagcctgagcaagctgagaatcctgatcatcagccacaacagaatccagtacctggacatcagcgtgttcaagttcaaccaggagctggagtacctggacctgagccacaacaagctggtgaagatcagctgccaccccaccgtgaacctgaagcacctggacctgagcttcaacgccttcgacgccctgcccatctgcaaggagttcggcaacatgagccagctgaagttcctgggcctgagcaccacccacctggagaagagcagcgtgctgcccatcgcccacctgaacatcagcaaggtgctgctggtgctgggcgagacctacggcgagaaggaggaccccgagggcctgcaggacttcaacaccgagagcctgcacatcgtgttccccaccaacaaggagttccacttcatcctggacgtgagcgtgaagaccgtggccaacctggagctgagcaacatcaagtgcgtgctggaggacaacaagtgcagctacttcctgagcatcctggccaagctgcagaccaaccccaagctgagcagcctgaccctgaacaacatcgagaccacctggaacagcttcatcagaatcctgcagctggtgtggcacaccaccgtgtggtacttcagcatcagcaacgtgaagctgcagggccagctggacttcagagacttcgactacagcggcaccagcctgaaggccctgagcatccaccaggtggtgagcgacgtgttcggcttcccccagagctacatctacgagatcttcagcaacatgaacatcaagaacttcaccgtgagcggcaccagaatggtgcacatgctgtgccccagcaagatcagccccttcctgcacctggacttcagcaacaacctgctgaccgacaccgtgttcgagaactgcggccacctgaccgagctggagaccctgatcctgcagatgaaccagctgaaggagctgagcaagatcgccgagatgaccacccagatgaagagcctgcagcagctggacatcagccagaacagcgtgagctacgacgagaagaagggcgactgcagctggaccaagagcctgctgagcctgaacatgagcagcaacatcctgaccgacaccatcttcagatgcctgccccccagaatcaaggtgctggacctgcacagcaacaagatcaagagcatccccaagcaggtggtgaagctggaggccctgcaggagctgaacgtggccttcaacagcctgaccgacctgcccggctgcggcagcttcagcagcctgagcgtgctgatcatcgaccacaacagcgtgagccaccccagcgccgacttcttccagagctgccagaagatgagaagcatcaaggccggcgacaaccccttccagtgcacctgcgagctgggcgagttcgtgaagaacatcgaccaggtgagcagcgaggtgctggagggctggcccgacagctacaagtgcgactaccccgagagctacagaggcagcctgctgaaggacttccacatgagcgagctgagctgcaacatcaccctgctgatcgtgaccatcgtggccaccatgctggtgctggccgtgaccgtgaccagcctgtgcatctacctggacctgccctggtacctgagaatggtgtgccagtggacccagaccagaagaagagccagaaacatccccctggaggagctgcagagaaacctgcagttccacgccttcatcagctacagcggccacgacagcttctgggtgaagaacgagctgctgcccaacctggagaaggagggcatgcagatctgcctgcacgagagaaacttcgtgcccggcaagagcatcgtggagaacatcatcacctgcatcgagaagagctacaagagcatcttcgtgctgagccccaacttcgtgcagagcgagtggtgccactacgagctgtacttcgcccaccacaacctgttccacgagggcagcaacagcctgatcctgatcctgctggagcccatcccccagtacagcatccccagcagctaccacaagctgaagagcctgatggccagaagaacctacctggagtggcccaaggagaagagcaagagaggcctgttctgggccaacctgagagccgccatcaacatcaagctgaccgagcaggccaagaagtga

SEQ ID NO: 9521 - RNA, 2361 nt, synthetic construct
  misc_feature 1..2361: note = derived and/or modified sequence opt5 fromTLR1__Homo_sapiens__AAY85634
  source 1..2361: mol_type = other RNA
atgaccagcatcttccactttgccattatcttcatgctgattctccagatccggattcaactgtccgaggaatctgagtttcttgtggacagaagcaagaacggcctgatccatgtccccaaagatctctcccagaagacaacgatcctgaatatttctcagaactacatcagcgaactttggacctccgacattctgtctctcagcaaactgcgcatcctgattatctcccacaatagaatccagtatctcgatattagcgttttcaagtttaaccaagagctggaataccttgacctgtctcataataaactcgtgaagatctcctgccaccctacagtgaacctgaagcatcttgatctgagcttcaatgcttttgacgccctcccgatttgtaaagagttcgggaacatgtctcagctgaagtttctgggactctccaccacacacctggagaaaagctctgtccttcccatcgcgcacctgaatatttccaaggtgctcctggttcttggcgaaacctatggggagaaagaagatcctgagggactgcaggacttcaacacagagagcctccatatcgtgtttcccaccaataaggagttccactttattctggatgtctccgtgaagacggttgctaacctggaactctctaatatcaaatgcgtgctggaagacaacaagtgtagctacttcctttccatcctggccaaactccagaccaatcctaagctgagctctcttacactgaacaacattgagaccacatggaatagcttcatccggattctccaactggtctggcataccacggtgtggtattttagcatctctaacgtgaaactgcagggccagctcgatttccgcgactttgattacagcgggacatccctgaaggccctttctattcaccaggtcgttagcgacgtgttcggatttccccaatcctatatctacgaaatcttcagcaatatgaacattaaaaattttaccgtgtctggcacaagaatggtccacatgctgtgcccttccaagatcagcccgttcctccatctggacttttctaacaatctgcttaccgataccgtgttcgagaactgtggccacctcacagagctggaaacgctgattctccagatgaatcagctgaaggagctttccaaaatcgctgaaatgaccacacaaatgaagtccctgcagcagctcgacatttcccagaactctgttagctacgatgagaaaaagggggactgctcctggaccaaatctctgctgagccttaatatgtccagcaacatcctcacagataccatttttcggtgtctgccccctcgcatcaaggtgctggacctccattctaataagatcaaatccattcccaagcaagtcgtgaaactggaagcccttcaggagctgaacgttgctttcaatagcctcacggatctgcctggatgcggctctttttccagcctgtctgtgcttatcattgaccacaacagcgtctcccatcccagcgccgatttcttccagtcttgtcagaagatgagatccatcaaagcgggggacaacccgtttcaatgcacatgtgagctcggagagttcgtgaagaatattgatcaggtcagctccgaagtgctggaaggctggcctgactcttataagtgcgactaccccgagagctatcgggggtccctgctcaaagattttcacatgtctgaactgagctgcaacatcacccttctgatcgttaccattgtggccacaatgctcgtcctggctgtgaccgttacatccctgtgtatctaccttgacctcccttggtatctgcgcatggtgtgccagtggacgcagaccagacggcgcgccagaaatattcccctggaggagctccaacggaacctgcagttccacgcttttatctcttacagcggacatgattccttctgggtcaagaatgaacttctgcccaacctcgagaaagaaggcatgcagatttgtctgcacgagcgcaattttgtgcctggcaagagcatcgtggagaacatcattacatgcatcgaaaaatcttataagtccattttcgttctgagcccgaattttgtccagtctgagtggtgtcattacgaactttacttcgcccaccacaacctgtttcatgaggggtccaatagcctcatcctgattctcctggaacccatccctcaatattctatcccctccagctaccacaaacttaagtccctgatggcgagacggacctatctcgagtggcctaaggagaaaagcaagagaggactgttctgggccaacctgcgcgctgccattaatatcaaacttacagaacaggctaagaaatga

SEQ ID NO: 9522 - protein, 786 aa, synthetic construct [sequence omitted]

SEQ ID NO: 9523 - RNA, 2361 nt, synthetic construct
  misc_feature 1..2361: note = TLR1__Homo_sapiens__AAY85635
  source 1..2361: mol_type = other RNA
atgactagcatcttccattttgccattatcttcatgttaatacttcagatcagaatacaattatctgaagaaagtgaatttttagttgataggtcaaaaaacggtctcatccacgttcctaaagacctatcccagaaaacaacaatcttaaatatatcgcaaaattatatatctgagctttggacttctgacatcttatcactgtcaaaactgaggattttgataatttctcataatagaatccagtatcttgatatcagtgttttcaaattcaaccaggaattggaatacttggatttgtcccacaacaagttggtgaagatttcttgccaccctactgtgaacctcaagcacttggacctgtcatttaatgcatttgatgccctgcctatatgcaaagagtttggcaatatgtctcaactaaaatttctggggttgagcaccacacacttagaaaaatctagtgtgctgccaattgctcatttgaatatcagcaaggtcttgctggtcttaggagagacttatggggaaaaagaagaccctgagggccttcaagactttaacactgagagtctgcacattgtgttccccacaaacaaagaattccattttattttggatgtgtcagtcaagactgtagcaaatctggaactatctaatatcaaatgtgtgctagaagataacaaatgttcttacttcctaagtattctggcgaaacttcaaacaaatccaaagttatcaagtcttaccttaaacaacattgaaacaacttggaattctttcattaggatcctccagctggtttggcatacaactgtatggtatttctcaatttcaaacgtgaagctacagggtcagctggacttcagagattttgattattctggcacttccttgaaggccttgtctatacaccaagttgtcagcgatgtgttcggttttccgcaaagttatatctatgaaatcttttcgaatatgaacatcaaaaatttcacagtgtctggtacacgcatggtccacatgctttgcccatccaaaattagcccgttcctgcatttggatttttccaataatctcttaacagacacggtttttgaaaattgtgggcaccttactgagttggagacacttattttacaaatgaatcaattaaaagaactttcaaaaatagctgaaatgactacacagatgaagtctctgcaacaattggatattagccagaattctgtaagctatgatgaaaagaaaggagactgttcttggactaaaagtttattaagtttaaatatgtcttcaaatatacttactgacactattttcagatgtttacctcccaggatcaaggtacttgatcttcacagcaataaaataaagagcattcctaaacaagtcgtaaaactggaagctttgcaagaactcaatgttgctttcaattctttaactgaccttcctggatgtggcagctttagcagcctttctgtattgatcattgatcacaattcagtttcccacccatcagctgatttcttccagagctgccagaagatgaggtcaataaaagcaggggacaatccattccaatgtacctgtgagctaggagaatttgtcaaaaatatagaccaagcatcaagtgaagtgttagagggctggcctgattcttataagtgtgactacccggaaagttatagaggaaccctactaaaggactttcacatgtctgaattatcctgcaacataactctgctgatcgtcaccatcgttgccaccatgctggtgttggctgtgactgtgacctccctctgcatctacttggatctgccctggtatctcaggatggtgtgccagtggacccagacccggcgcagggccaggaacatacccttagaagaactccaaagaaatctccagtttcatgcatttatttcatatagtgggcacgattctttctgggtgaagaatgaattattgccaaacctagagaaagaaggtatgcagatttgccttcatgagagaaactttgttcctggcaagagcattgtggaaaatatcatcacctgcattgagaagagttacaagtccatctttgttttgtctcccaactttgtccagagtgaatggtgccattatgaactctactttgcccatcacaatctctttcatgaaggatctaatagcttaatcctgatcttgctggaacccattccgcagtactccattcctagcagttatcacaagctcaaaagtctcatggccaggaggacttatttggaatggcccaaggaaaagagcaaacgtggccttttttgggctaacttaagggcagccattaatattaagctgacagagcaagcaaagaaatag

SEQ ID NO: 9524 - RNA, 2361 nt, synthetic construct
  misc_feature 1..2361: note = derived and/or modified sequence opt1 fromTLR1__Homo_sapiens__AAY85635
  source 1..2361: mol_type = other RNA
atgaccagcatcttccacttcgccatcatcttcatgctgatcctccagatccgcatccagctgtccgaggagagcgagttcctggtggaccggtccaagaacggcctcatccacgtccccaaggacctgagccagaagaccacgatcctgaacatctcccagaactacatcagcgagctctggacctccgacatcctgagcctgtccaagctccgcatcctgatcatcagccacaaccggatccagtacctggacatctccgtgttcaagttcaaccaggagctcgagtacctggacctgagccacaacaagctcgtgaagatctcctgccacccgaccgtcaacctgaagcacctggacctcagcttcaacgccttcgacgcgctgcccatctgcaaggagttcgggaacatgtcccagctgaagttcctcggcctgagcaccacgcacctggagaagtccagcgtgctccccatcgcccacctgaacatctccaaggtgctgctcgtcctgggggagacctacggcgagaaggaggaccccgaggggctgcaggacttcaacaccgagagcctccacatcgtgttcccgaccaacaaggagttccacttcatcctggacgtgagcgtcaagacggtggccaacctggagctctccaacatcaagtgcgtgctggaggacaacaagtgcagctacttcctgtccatcctcgccaagctgcagaccaaccccaagctgagctccctcaccctgaacaacatcgagaccacgtggaacagcttcatccgcatcctgcagctcgtctggcacaccaccgtgtggtacttctccatcagcaacgtgaagctgcagggccagctggacttccgggacttcgactactccggcaccagcctcaaggccctgtccatccaccaggtcgtgagcgacgtgttcgggttcccccagtcctacatctacgagatcttcagcaacatgaacatcaagaacttcacggtctccggcacccgcatggtgcacatgctgtgccccagcaagatctccccgttcctccacctggacttcagcaacaacctgctgaccgacaccgtgttcgagaactgcgggcacctcacggagctggagaccctgatcctccagatgaaccagctgaaggagctgtccaagatcgcggagatgaccacccagatgaagtccctccagcagctggacatcagccagaacagcgtcagctacgacgagaagaagggcgactgctcctggaccaagagcctgctctccctgaacatgagctccaacatcctgaccgacaccatcttccggtgcctcccgccccgcatcaaggtgctggacctgcacagcaacaagatcaagtccatccccaagcaggtcgtgaagctcgaggccctgcaggagctgaacgtggccttcaacagcctcaccgacctgcccgggtgcggctccttcagctccctgagcgtcctcatcatcgaccacaactccgtgagccacccctccgccgacttcttccagagctgccagaagatgcggagcatcaaggcgggcgacaaccccttccagtgcacgtgcgagctgggggagttcgtgaagaacatcgaccaggcctccagcgaggtcctggagggctggcccgactcctacaagtgcgactacccggagagctaccgcgggaccctcctgaaggacttccacatgtccgagctgagctgcaacatcaccctcctgatcgtgaccatcgtggccacgatgctggtcctcgccgtgaccgtgacctccctgtgcatctacctggacctcccctggtacctgcggatggtctgccagtggacccagacgcgccggcgcgcccggaacatccccctggaggagctccagcgcaacctgcagttccacgcgttcatcagctactccggccacgacagcttctgggtgaagaacgagctgctccccaacctggagaaggagggcatgcagatctgcctgcacgagcggaacttcgtgccggggaagtccatcgtcgagaacatcatcacgtgcatcgagaagtcctacaagagcatcttcgtgctcagccccaacttcgtgcagtccgagtggtgccactacgagctgtacttcgcccaccacaacctgttccacgagggcagcaactccctcatcctgatcctgctcgagcccatcccccagtacagcatcccgtccagctaccacaagctcaagagcctgatggcccgccggacctacctggagtggcccaaggagaagtccaagcgcgggctgttctgggccaacctgcgggccgcgatcaacatcaagctcaccgagcaggccaagaagtga

SEQ ID NO: 9525 - RNA, 2361 nt, synthetic construct
  misc_feature 1..2361: note = derived and/or modified sequence opt2 fromTLR1__Homo_sapiens__AAY85635
  source 1..2361: mol_type = other RNA
atgacctccatcttccacttcgccatcatcttcatgctcatcctccagatccgcatccagctctccgaggagtccgagttcctcgtcgaccgctccaagaacggcctcatccacgtccccaaggacctctcccagaagaccaccatcctcaacatctcccagaactacatctccgagctctggacctccgacatcctctccctctccaagctccgcatcctcatcatctcccacaaccgcatccagtacctcgacatctccgtcttcaagttcaaccaggagctcgagtacctcgacctctcccacaacaagctcgtcaagatctcctgccaccccaccgtcaacctcaagcacctcgacctctccttcaacgccttcgacgccctccccatctgcaaggagttcggcaacatgtcccagctcaagttcctcggcctctccaccacccacctcgagaagtcctccgtcctccccatcgcccacctcaacatctccaaggtcctcctcgtcctcggcgagacctacggcgagaaggaggaccccgagggcctccaggacttcaacaccgagtccctccacatcgtcttccccaccaacaaggagttccacttcatcctcgacgtctccgtcaagaccgtcgccaacctcgagctctccaacatcaagtgcgtcctcgaggacaacaagtgctcctacttcctctccatcctcgccaagctccagaccaaccccaagctctcctccctcaccctcaacaacatcgagaccacctggaactccttcatccgcatcctccagctcgtctggcacaccaccgtctggtacttctccatctccaacgtcaagctccagggccagctcgacttccgcgacttcgactactccggcacctccctcaaggccctctccatccaccaggtcgtctccgacgtcttcggcttcccccagtcctacatctacgagatcttctccaacatgaacatcaagaacttcaccgtctccggcacccgcatggtccacatgctctgcccctccaagatctcccccttcctccacctcgacttctccaacaacctcctcaccgacaccgtcttcgagaactgcggccacctcaccgagctcgagaccctcatcctccagatgaaccagctcaaggagctctccaagatcgccgagatgaccacccagatgaagtccctccagcagctcgacatctcccagaactccgtctcctacgacgagaagaagggcgactgctcctggaccaagtccctcctctccctcaacatgtcctccaacatcctcaccgacaccatcttccgctgcctccccccccgcatcaaggtcctcgacctccactccaacaagatcaagtccatccccaagcaggtcgtcaagctcgaggccctccaggagctcaacgtcgccttcaactccctcaccgacctccccggctgcggctccttctcctccctctccgtcctcatcatcgaccacaactccgtctcccacccctccgccgacttcttccagtcctgccagaagatgcgctccatcaaggccggcgacaaccccttccagtgcacctgcgagctcggcgagttcgtcaagaacatcgaccaggcctcctccgaggtcctcgagggctggcccgactcctacaagtgcgactaccccgagtcctaccgcggcaccctcctcaaggacttccacatgtccgagctctcctgcaacatcaccctcctcatcgtcaccatcgtcgccaccatgctcgtcctcgccgtcaccgtcacctccctctgcatctacctcgacctcccctggtacctccgcatggtctgccagtggacccagacccgccgccgcgcccgcaacatccccctcgaggagctccagcgcaacctccagttccacgccttcatctcctactccggccacgactccttctgggtcaagaacgagctcctccccaacctcgagaaggagggcatgcagatctgcctccacgagcgcaacttcgtccccggcaagtccatcgtcgagaacatcatcacctgcatcgagaagtcctacaagtccatcttcgtcctctcccccaacttcgtccagtccgagtggtgccactacgagctctacttcgcccaccacaacctcttccacgagggctccaactccctcatcctcatcctcctcgagcccatcccccagtactccatcccctcctcctaccacaagctcaagtccctcatggcccgccgcacctacctcgagtggcccaaggagaagtccaagcgcggcctcttctgggccaacctccgcgccgccatcaacatcaagctcaccgagcaggccaagaagtga

SEQ ID NO: 9526 - RNA, 2361 nt, synthetic construct
  misc_feature 1..2361: note = derived and/or modified sequence opt3 fromTLR1__Homo_sapiens__AAY85635
  source 1..2361: mol_type = other RNA
atgaccagcatcttccactttgccattatattcatgctgatcctccagattagaatccaactttccgaggaatctgagtttctggtggacaggtcaaagaacggcttgattcatgtccccaaagatttaagtcagaagacaactatcctgaatataagccagaactacatctccgaactatggacgtctgacattctctcgctgtcaaaacttcggatcctgattatcagccacaatcgcatacagtatttggatattagtgttttcaagtttaaccaagagctcgaatacctggacctgtcccataataaactcgtgaagatctcttgccaccctaccgtaaacttaaagcatctggatcttagcttcaatgcttttgacgcattgccaatttgtaaagagttcgggaacatgtcccagctgaagtttctaggactctcaacaactcacctggagaaaagtagcgtgcttccgatcgcccacctgaatatctctaaggtcttgctcgtgctgggtgaaacctatggcgagaaagaagatcccgaggggttacaggacttcaacacagagtccctgcatattgtttttcctaccaataaggagttccactttatactcgatgtgtcagtcaagactgtggcgaaccttgaactgagcaatatcaaatgcgtattggaagacaacaagtgtagttacttcctatctattctggctaaactccagacaaatccaaagctgtccagccttaccctgaacaacatcgagacgacttggaatagcttcatacgaattttgcaactcgtttggcataccacagtgtggtatttttctatctccaacgtcaaactgcagggacagttagatttccgtgactttgattactcaggcacttcactgaaggccctaagcatccaccaggtggtgtccgacgtcttcggttttccccaatcttatatttacgaaatcttcagcaatatgaacattaaaaattttaccgtttcagggacaagaatggtgcacatgctctgccctagtaagatatccccattcctgcatcttgactttagcaacaatttgctgaccgatacggtattcgagaactgtggacacctcactgagctggaaacacttatcctgcagatgaatcagttgaaggagctctctaaaattgcagaaatgaccactcaaatgaagtcactgcagcagttagacatcagtcagaacagcgtgtcctacgatgagaaaaagggcgactgctcttggacaaaatcgctgctaagcctcaatatgtcctcaaacatcctgaccgatacgatttttaggtgtcttccccctcggataaaggtcttggacctgcatagtaataagatcaaatctattccaaagcaagtggttaaactcgaagccctgcaggagttaaacgtggctttcaatagcctgaccgatcttccgggctgcgggtcctttagtagcttgtctgtcctcatcattgaccacaactccgtgagtcatcccagcgcagatttcttccagtcttgtcagaagatgcgctccatcaaagccggagacaacccttttcaatgcacatgtgagctgggtgagttcgtaaagaatatagatcaggcttcaagtgaagttctagaaggctggccagacagctataagtgcgactaccccgagtcgtatagagggactctgctcaaagattttcacatgtccgaactgtcttgcaacatcacccttttgattgtgacaatcgtcgccactatgctggtgttagcggtcaccgtgacaagcctctgtatttacctggaccttccttggtatctgaggatggtttgccagtggacccagactcggcgccgagcaagaaatatcccattggaggagctccaaaggaacctgcagttccacgcctttatatcatacagtggacatgattccttctgggtgaagaatgaactactgcccaacctcgagaaagaaggcatgcagatttgtctgcacgagcggaattttgtaccgggtaagtctatcgtcgagaacattatcacgtgcatagaaaaatcgtataagtccatcttcgtgctttcacctaattttgttcagagcgagtggtgtcattacgaattgtacttcgctcaccacaacctgtttcatgaggggagtaattctttaattctcatcctgcttgaacccattccacaatattccatccctagctcgtaccacaagctgaaatcactaatggcccgtcgcacatatctcgagtggcccaaggagaaatctaagagaggactgttctgggcaaacttgagggctgccataaatattaaactgaccgaacaggcgaagaaatga

SEQ ID NO: 9527 - RNA, 2361 nt, synthetic construct
  misc_feature 1..2361: note = derived and/or modified sequence opt4 fromTLR1__Homo_sapiens__AAY85635
  source 1..2361: mol_type = other RNA
atgaccagcatcttccacttcgccatcatcttcatgctgatcctgcagatcagaatccagctgagcgaggagagcgagttcctggtggacagaagcaagaacggcctgatccacgtgcccaaggacctgagccagaagaccaccatcctgaacatcagccagaactacatcagcgagctgtggaccagcgacatcctgagcctgagcaagctgagaatcctgatcatcagccacaacagaatccagtacctggacatcagcgtgttcaagttcaaccaggagctggagtacctggacctgagccacaacaagctggtgaagatcagctgccaccccaccgtgaacctgaagcacctggacctgagcttcaacgccttcgacgccctgcccatctgcaaggagttcggcaacatgagccagctgaagttcctgggcctgagcaccacccacctggagaagagcagcgtgctgcccatcgcccacctgaacatcagcaaggtgctgctggtgctgggcgagacctacggcgagaaggaggaccccgagggcctgcaggacttcaacaccgagagcctgcacatcgtgttccccaccaacaaggagttccacttcatcctggacgtgagcgtgaagaccgtggccaacctggagctgagcaacatcaagtgcgtgctggaggacaacaagtgcagctacttcctgagcatcctggccaagctgcagaccaaccccaagctgagcagcctgaccctgaacaacatcgagaccacctggaacagcttcatcagaatcctgcagctggtgtggcacaccaccgtgtggtacttcagcatcagcaacgtgaagctgcagggccagctggacttcagagacttcgactacagcggcaccagcctgaaggccctgagcatccaccaggtggtgagcgacgtgttcggcttcccccagagctacatctacgagatcttcagcaacatgaacatcaagaacttcaccgtgagcggcaccagaatggtgcacatgctgtgccccagcaagatcagccccttcctgcacctggacttcagcaacaacctgctgaccgacaccgtgttcgagaactgcggccacctgaccgagctggagaccctgatcctgcagatgaaccagctgaaggagctgagcaagatcgccgagatgaccacccagatgaagagcctgcagcagctggacatcagccagaacagcgtgagctacgacgagaagaagggcgactgcagctggaccaagagcctgctgagcctgaacatgagcagcaacatcctgaccgacaccatcttcagatgcctgccccccagaatcaaggtgctggacctgcacagcaacaagatcaagagcatccccaagcaggtggtgaagctggaggccctgcaggagctgaacgtggccttcaacagcctgaccgacctgcccggctgcggcagcttcagcagcctgagcgtgctgatcatcgaccacaacagcgtgagccaccccagcgccgacttcttccagagctgccagaagatgagaagcatcaaggccggcgacaaccccttccagtgcacctgcgagctgggcgagttcgtgaagaacatcgaccaggccagcagcgaggtgctggagggctggcccgacagctacaagtgcgactaccccgagagctacagaggcaccctgctgaaggacttccacatgagcgagctgagctgcaacatcaccctgctgatcgtgaccatcgtggccaccatgctggtgctggccgtgaccgtgaccagcctgtgcatctacctggacctgccctggtacctgagaatggtgtgccagtggacccagaccagaagaagagccagaaacatccccctggaggagctgcagagaaacctgcagttccacgccttcatcagctacagcggccacgacagcttctgggtgaagaacgagctgctgcccaacctggagaaggagggcatgcagatctgcctgcacgagagaaacttcgtgcccggcaagagcatcgtggagaacatcatcacctgcatcgagaagagctacaagagcatcttcgtgctgagccccaacttcgtgcagagcgagtggtgccactacgagctgtacttcgcccaccacaacctgttccacgagggcagcaacagcctgatcctgatcctgctggagcccatcccccagtacagcatccccagcagctaccacaagctgaagagcctgatggccagaagaacctacctggagtggcccaaggagaagagcaagagaggcctgttctgggccaacctgagagccgccatcaacatcaagctgaccgagcaggccaagaagtga

SEQ ID NO: 9528 - RNA, 2361 nt, synthetic construct
  misc_feature 1..2361: note = derived and/or modified sequence opt5 fromTLR1__Homo_sapiens__AAY85635
  source 1..2361: mol_type = other RNA
atgaccagcatcttccactttgccattatcttcatgctgattctccagatccggattcaactgtccgaggaatctgagtttcttgtggacagaagcaagaacggcctgatccatgtccccaaagatctctcccagaagacaacgatcctgaatatttctcagaactacatcagcgaactttggacctccgacattctgtctctcagcaaactgcgcatcctgattatctcccacaatagaatccagtatctcgatattagcgttttcaagtttaaccaagagctggaataccttgacctgtctcataataaactcgtgaagatctcctgccaccctacagtgaacctgaagcatcttgatctgagcttcaatgcttttgacgccctcccgatttgtaaagagttcgggaacatgtctcagctgaagtttctgggactctccaccacacacctggagaaaagctctgtccttcccatcgcgcacctgaatatttccaaggtgctcctggttcttggcgaaacctatggggagaaagaagatcctgagggactgcaggacttcaacacagagagcctccatatcgtgtttcccaccaataaggagttccactttattctggatgtctccgtgaagacggttgctaacctggaactctctaatatcaaatgcgtgctggaagacaacaagtgtagctacttcctttccatcctggccaaactccagaccaatcctaagctgagctctcttacactgaacaacattgagaccacatggaatagcttcatccggattctccaactggtctggcataccacggtgtggtattttagcatctctaacgtgaaactgcagggccagctcgatttccgcgactttgattacagcgggacatccctgaaggccctttctattcaccaggtcgttagcgacgtgttcggatttccccaatcctatatctacgaaatcttcagcaatatgaacattaaaaattttaccgtgtctggcacaagaatggtccacatgctgtgcccttccaagatcagcccgttcctccatctggacttttctaacaatctgcttaccgataccgtgttcgagaactgtggccacctcacagagctggaaacgctgattctccagatgaatcagctgaaggagctttccaaaatcgctgaaatgaccacacaaatgaagtccctgcagcagctcgacatttcccagaactctgttagctacgatgagaaaaagggggactgctcctggaccaaatctctgctgagccttaatatgtccagcaacatcctcacagataccatttttcggtgtctgccccctcgcatcaaggtgctggacctccattctaataagatcaaatccattcccaagcaagtcgtgaaactggaagcccttcaggagctgaacgttgctttcaatagcctcacggatctgcctggatgcggctctttttccagcctgtctgtgcttatcattgaccacaacagcgtctcccatcccagcgccgatttcttccagtcttgtcagaagatgagatccatcaaagcgggggacaacccgtttcaatgcacatgtgagctcggagagttcgtgaagaatattgatcaggccagctccgaagtcctggaaggctggcctgactcttataagtgcgactaccccgagagctatcgggggaccctgctcaaagattttcacatgtccgaactgtcttgcaacatcacccttctgatcgtgacaattgttgctaccatgctcgtgctggccgtcacagtgacgagcctgtgtatctaccttgacctcccttggtatctgcgcatggtttgccagtggacccagacaagacggcgcgctagaaatattcccctggaggagctccaacggaacctgcagttccacgcctttatctcctactctggacatgatagcttctgggtgaagaatgaacttctgcccaacctcgagaaagaaggcatgcagatttgtctgcacgagcgcaattttgtccctggcaagtccatcgtggagaacatcattacctgcatcgaaaagagctataagtctattttcgtgctgtccccgaattttgttcagagcgagtggtgtcattacgaactttacttcgcgcaccacaacctgtttcatgaggggtctaattccctcatcctgattctcctggaacccatccctcaatatagcatcccctcttcctaccacaaacttaaaagcctgatggccagacggacatatctcgagtggcctaaggagaaatccaagagaggactgttctgggctaacctgcgcgccgctattaatatcaaacttaccgaacaggccaagaaatga

SEQ ID NO: 9529 - protein, 786 aa, synthetic construct [sequence omitted]

SEQ ID NO: 9530 - RNA, 2361 nt, synthetic construct
  misc_feature 1..2361: note = TLR1__Homo_sapiens__AAY85637
  source 1..2361: mol_type = other RNA
atgactagcatcttccattttgccattatcttcatgttaatacttcagatcagaatacaattatctgaagaaagtgaatttttagttgataggtcaaaaaacggtctcatccacgttcctaaagacctatcccagaaaacaacaatcttaaatatatcgcaaaattatatatctgagctttggacttctgacatcttatcactgtcaaaactgaggattttgataatttctcataatagaatccagtatcttgatatcagtgttttcaaattcaaccaggaattggaatacttggatttgtcccacaacaagttggtgaagatttcttgccaccctactgtgaacctcaagcacttggacctgtcatttaatgcatttgatgccctgcctatatgcaaagagtttggcaatatgtctcaactaaaatttctggggttgagcaccacacacttagaaaaatctagtgtgctgccaattgctcatttgaatatcagcaaggtcttgctggtcttaggagagacttatggggaaaaagaagaccctgagggccttcaagactttaacactgagagtctgcacattgtgttccccacaaacaaagaattccattttattttggatgtgtcagtcaagactgtagcaaatctggaactatctaatatcaaatgtgtgctagaagataacaaatgttcttacttcctaagtattctggcgaaacttcaaacaaatccaaagttatcaagtcttaccttaaacaacattgaaacaacttggaattctttcattaggatcctccagctggtttggcatacaactgtatggtatttctcaatttcaaacgtgaagctacagggtcagctggacttcagagattttgattattctggcacttccttgaaggccttgtctatacaccaagttgtcagcgatgtgttcggttttccgcaaagttatatctatgaaatcttttcgaatatgaacatcaaaaatttcacagtgtctggtacacgcatggtccacatgctttgcccatccaaaattagcccgttcctgcatttggatttttccaataatctcttaacagacacggtttttgaaaattgtgggcaccttactgagttggagacacttattttacaaatgaatcaattaaaagaactttcaaaaatagctgaaatgactacacagatgaagtctctgcaacaattggatattagccagaattctgtaagctatgatgaaaagaaaggagactgttcttggactaaaagtttattaagtttaaatatgtcttcaaatatacttactgacactattttcagatgtatacctcccaggatcaaggtacttgatcttcacagcaataaaataaagagcattcctaaacaagtcgtaaaactggaagctttgcaagaactcaatgttgctttcaattctttaactgaccttcctggatgtggcagctttagcagcctttctgtattgatcattgatcacaattcagtttcccacccatcagctgatttcttccagagctgccagaagatgaggtcaataaaagcaggggacaatccattccaatgtacctgtgagctaggagaatttgtcaaaaatatagaccaagtatcaagtgaagtgttagagggctggcctgattcttataagtgtgactacccggaaagttatagaggaaccctactaaaggactttcacatgtctgaattatcctgcaacataactctgctgatcgtcaccatcgttgccaccatgctggtgttggctgtgactgtgacctccctctgcatctacttggatctgccctggtatctcaggatggtgtgccagtggacccagacccggcgcagggccaggaacatacccttagaagaactccaaagaaatctccagtttcatgcatttatttcatatagtgggcacgattctttctgggtgaagaatgaattattgccaaacctagagaaagaaggtatgcagatttgccttcatgagagaaactttgttcctggcaagagcattgtggaaaatatcatcacctgcattgagaagagttacaagtccatctttgttttgtctcccaactttgtccagagtgaatggtgccattatgaactctactttgcccatcacaatctctttcatgaaggatctaatagcttaatcctgatcttgctggaacccattccgcagtactccattcctagcagttatcacaagctcaaaagtctcatggccaggaggacttatttggaatggcccaaggaaaagagcaaacgtggccttttttgggctaacttaagggcagccattaatattaagctgacagagcaagcaaagaaatag

SEQ ID NO: 9531 - RNA, 2361 nt, synthetic construct
  misc_feature 1..2361: note = derived and/or modified sequence opt1 fromTLR1__Homo_sapiens__AAY85637
  source 1..2361: mol_type = other RNA
atgaccagcatcttccacttcgccatcatcttcatgctgatcctccagatccgcatccagctgtccgaggagagcgagttcctggtggaccggtccaagaacgggctcatccacgtccccaaggacctgagccagaagaccacgatcctgaacatctcccagaactacatcagcgagctctggacctccgacatcctgagcctgtccaagctccgcatcctgatcatcagccacaaccggatccagtacctggacatctccgtgttcaagttcaaccaggagctcgagtacctggacctgagccacaacaagctcgtgaagatctcctgccacccgaccgtcaacctgaagcacctggacctcagcttcaacgccttcgacgcgctgcccatctgcaaggagttcgggaacatgtcccagctgaagttcctcggcctgagcaccacgcacctggagaagtccagcgtgctccccatcgcccacctgaacatctccaaggtgctgctcgtcctgggggagacctacggcgagaaggaggaccccgaggggctgcaggacttcaacaccgagagcctccacatcgtgttcccgaccaacaaggagttccacttcatcctggacgtgagcgtcaagacggtggccaacctggagctctccaacatcaagtgcgtgctggaggacaacaagtgcagctacttcctgtccatcctcgccaagctgcagaccaaccccaagctgagctccctcaccctgaacaacatcgagaccacgtggaacagcttcatccgcatcctgcagctcgtctggcacaccaccgtgtggtacttctccatcagcaacgtgaagctgcagggccagctggacttccgggacttcgactactccggcaccagcctcaaggccctgtccatccaccaggtcgtgagcgacgtgttcgggttcccccagtcctacatctacgagatcttcagcaacatgaacatcaagaacttcacggtctccggcacccgcatggtgcacatgctgtgccccagcaagatctccccgttcctccacctggacttcagcaacaacctgctgaccgacaccgtgttcgagaactgcgggcacctcacggagctggagaccctgatcctccagatgaaccagctgaaggagctgtccaagatcgcggagatgaccacccagatgaagtccctccagcagctggacatcagccagaacagcgtcagctacgacgagaagaagggcgactgctcctggaccaagagcctgctctccctgaacatgagctccaacatcctgaccgacaccatcttccggtgcatcccgccccgcatcaaggtgctcgacctgcacagcaacaagatcaagtccatccccaagcaggtcgtgaagctggaggccctccaggagctgaacgtggccttcaacagcctgaccgacctccccgggtgcggctccttcagctccctgagcgtcctgatcatcgaccacaactccgtgagccacccctccgccgacttcttccagagctgccagaagatgcggagcatcaaggcgggcgacaaccccttccagtgcacgtgcgagctcggggagttcgtgaagaacatcgaccaggtctccagcgaggtgctggagggctggcccgactcctacaagtgcgactacccggagagctaccgcgggaccctgctcaaggacttccacatgtccgagctgagctgcaacatcaccctgctcatcgtgaccatcgtcgccacgatgctggtgctggccgtgaccgtcacctccctctgcatctacctggacctgccctggtacctccggatggtgtgccagtggacccagacgcgccggcgcgcccggaacatccccctggaggagctgcagcgcaacctccagttccacgccttcatcagctactccggccacgacagcttctgggtgaagaacgagctgctgcccaacctcgagaaggagggcatgcagatctgcctgcacgagcggaacttcgtcccggggaagtccatcgtggagaacatcatcacgtgcatcgagaagtcctacaagagcatcttcgtgctgagccccaacttcgtccagtccgagtggtgccactacgagctctacttcgcgcaccacaacctgttccacgagggcagcaactccctgatcctcatcctgctggagcccatcccccagtacagcatcccgtccagctaccacaagctcaagagcctgatggcccgccggacctacctggagtggcccaaggagaagtccaagcgcggcctcttctgggccaacctgcgggccgccatcaacatcaagctgaccgagcaggcgaagaagtga

SEQ ID NO: 9532 - RNA, 2361 nt, synthetic construct
  misc_feature 1..2361: note = derived and/or modified sequence opt2 fromTLR1__Homo_sapiens__AAY85637
  source 1..2361: mol_type = other RNA
atgacctccatcttccacttcgccatcatcttcatgctcatcctccagatccgcatccagctctccgaggagtccgagttcctcgtcgaccgctccaagaacggcctcatccacgtccccaaggacctctcccagaagaccaccatcctcaacatctcccagaactacatctccgagctctggacctccgacatcctctccctctccaagctccgcatcctcatcatctcccacaaccgcatccagtacctcgacatctccgtcttcaagttcaaccaggagctcgagtacctcgacctctcccacaacaagctcgtcaagatctcctgccaccccaccgtcaacctcaagcacctcgacctctccttcaacgccttcgacgccctccccatctgcaaggagttcggcaacatgtcccagctcaagttcctcggcctctccaccacccacctcgagaagtcctccgtcctccccatcgcccacctcaacatctccaaggtcctcctcgtcctcggcgagacctacggcgagaaggaggaccccgagggcctccaggacttcaacaccgagtccctccacatcgtcttccccaccaacaaggagttccacttcatcctcgacgtctccgtcaagaccgtcgccaacctcgagctctccaacatcaagtgcgtcctcgaggacaacaagtgctcctacttcctctccatcctcgccaagctccagaccaaccccaagctctcctccctcaccctcaacaacatcgagaccacctggaactccttcatccgcatcctccagctcgtctggcacaccaccgtctggtacttctccatctccaacgtcaagctccagggccagctcgacttccgcgacttcgactactccggcacctccctcaaggccctctccatccaccaggtcgtctccgacgtcttcggcttcccccagtcctacatctacgagatcttctccaacatgaacatcaagaacttcaccgtctccggcacccgcatggtccacatgctctgcccctccaagatctcccccttcctccacctcgacttctccaacaacctcctcaccgacaccgtcttcgagaactgcggccacctcaccgagctcgagaccctcatcctccagatgaaccagctcaaggagctctccaagatcgccgagatgaccacccagatgaagtccctccagcagctcgacatctcccagaactccgtctcctacgacgagaagaagggcgactgctcctggaccaagtccctcctctccctcaacatgtcctccaacatcctcaccgacaccatcttccgctgcatccccccccgcatcaaggtcctcgacctccactccaacaagatcaagtccatccccaagcaggtcgtcaagctcgaggccctccaggagctcaacgtcgccttcaactccctcaccgacctccccggctgcggctccttctcctccctctccgtcctcatcatcgaccacaactccgtctcccacccctccgccgacttcttccagtcctgccagaagatgcgctccatcaaggccggcgacaaccccttccagtgcacctgcgagctcggcgagttcgtcaagaacatcgaccaggtctcctccgaggtcctcgagggctggcccgactcctacaagtgcgactaccccgagtcctaccgcggcaccctcctcaaggacttccacatgtccgagctctcctgcaacatcaccctcctcatcgtcaccatcgtcgccaccatgctcgtcctcgccgtcaccgtcacctccctctgcatctacctcgacctcccctggtacctccgcatggtctgccagtggacccagacccgccgccgcgcccgcaacatccccctcgaggagctccagcgcaacctccagttccacgccttcatctcctactccggccacgactccttctgggtcaagaacgagctcctccccaacctcgagaaggagggcatgcagatctgcctccacgagcgcaacttcgtccccggcaagtccatcgtcgagaacatcatcacctgcatcgagaagtcctacaagtccatcttcgtcctctcccccaacttcgtccagtccgagtggtgccactacgagctctacttcgcccaccacaacctcttccacgagggctccaactccctcatcctcatcctcctcgagcccatcccccagtactccatcccctcctcctaccacaagctcaagtccctcatggcccgccgcacctacctcgagtggcccaaggagaagtccaagcgcggcctcttctgggccaacctccgcgccgccatcaacatcaagctcaccgagcaggccaagaagtga

SEQ ID NO: 9533 - RNA, 2361 nt, synthetic construct
  misc_feature 1..2361: note = derived and/or modified sequence opt3 fromTLR1__Homo_sapiens__AAY85637
  source 1..2361: mol_type = other RNA
atgaccagcatcttccactttgccattatattcatgctgatcctccagattagaatccaactttccgaggaatctgagtttctggtggacaggtcaaagaacggcttgattcatgtccccaaagatttaagtcagaagacaactatcctgaatataagccagaactacatctccgaactatggacgtctgacattctctcgctgtcaaaacttcggatcctgattatcagccacaatcgcatacagtatttggatattagtgttttcaagtttaaccaagagctcgaatacctggacctgtcccataataaactcgtgaagatctcttgccaccctaccgtaaacttaaagcatctggatcttagcttcaatgcttttgacgcattgccaatttgtaaagagttcgggaacatgtcccagctgaagtttctaggactctcaacaactcacctggagaaaagtagcgtgcttccgatcgcccacctgaatatctctaaggtcttgctcgtgctgggtgaaacctatggcgagaaagaagatcccgaggggttacaggacttcaacacagagtccctgcatattgtttttcctaccaataaggagttccactttatactcgatgtgtcagtcaagactgtggcgaaccttgaactgagcaatatcaaatgcgtattggaagacaacaagtgtagttacttcctatctattctggctaaactccagacaaatccaaagctgtccagccttaccctgaacaacatcgagacgacttggaactcgttcatacgaattttgcaactcgtttggcataccacagtgtggtatttttctatctccaatgtcaaactgcagggacagttagatttccgtgactttgattactcaggcacaagtctgaaggccctaagcatccaccaggtggtgtccgacgtcttcggttttccccaatcttatatttacgaaatcttcagcaatatgaacattaaaaattttaccgtttcagggacaagaatggtgcacatgctctgccctagtaagatatccccattcctgcatcttgactttagcaacaatttgctgaccgatacggtattcgagaactgtggacacctcactgagctggaaacacttatcctgcagatgaatcagttgaaggagctctctaaaattgcagaaatgaccactcaaatgaagtcactgcagcagttagacatcagtcagaacagcgtgtcctacgatgagaaaaagggcgactgctcttggacaaaatcgctgctaagcctcaatatgtcctcaaacatcctgaccgatacgatttttaggtgtataccccctcggatcaaggtccttgacttgcatagtaataagattaaatctatcccaaagcaagtggttaaactggaagccctccaggagctgaacgtggctttcaatagcttaaccgatctgccgggctgcgggtccttttcaagcctttctgtcttgattatcgaccacaactccgtgagtcatcccagcgcagatttcttccagtcttgtcagaagatgcgctccataaaagccggagacaacccttttcaatgcacatgtgagctcggtgagttcgtaaagaatatcgatcaggtttcaagtgaagtgctggaaggctggccagacagctataagtgcgactaccccgagtcgtatagagggactctactgaaagattttcacatgtccgaactctcttgcaacattaccctgcttatcgtcacaattgtggctactatgttggtcctggccgtgaccgttactagcttatgtatctacctcgacctgccttggtatcttaggatggtgtgccagtggacccagactcggcgccgagcgagaaatataccactggaggagttgcaaaggaacctccagttccacgcatttatttcatacagtggacatgattccttctgggtaaagaatgaactgctacccaacctggagaaagaaggcatgcagatctgtctccacgagcggaattttgtcccgggtaagtctattgtggagaacatcataacgtgcatcgaaaagagctataagtccattttcgttctgtcacctaattttgtgcagagcgagtggtgtcattacgaactttacttcgcccaccacaacttgtttcatgaggggagtaattctctgatcttaattctcctggaacccatcccacaatattccatacctagctcgtaccacaaacttaaatcactgatggctcgtcgcacatatctagagtggcccaaggagaaatctaagagaggactcttctgggccaacctgagggcagctattaatatcaaattgaccgaacaggccaagaaatga

SEQ ID NO: 9534 - RNA, 2361 nt, synthetic construct
  misc_feature 1..2361: note = derived and/or modified sequence opt4 fromTLR1__Homo_sapiens__AAY85637
  source 1..2361: mol_type = other RNA
atgaccagcatcttccacttcgccatcatcttcatgctgatcctgcagatcagaatccagctgagcgaggagagcgagttcctggtggacagaagcaagaacggcctgatccacgtgcccaaggacctgagccagaagaccaccatcctgaacatcagccagaactacatcagcgagctgtggaccagcgacatcctgagcctgagcaagctgagaatcctgatcatcagccacaacagaatccagtacctggacatcagcgtgttcaagttcaaccaggagctggagtacctggacctgagccacaacaagctggtgaagatcagctgccaccccaccgtgaacctgaagcacctggacctgagcttcaacgccttcgacgccctgcccatctgcaaggagttcggcaacatgagccagctgaagttcctgggcctgagcaccacccacctggagaagagcagcgtgctgcccatcgcccacctgaacatcagcaaggtgctgctggtgctgggcgagacctacggcgagaaggaggaccccgagggcctgcaggacttcaacaccgagagcctgcacatcgtgttccccaccaacaaggagttccacttcatcctggacgtgagcgtgaagaccgtggccaacctggagctgagcaacatcaagtgcgtgctggaggacaacaagtgcagctacttcctgagcatcctggccaagctgcagaccaaccccaagctgagcagcctgaccctgaacaacatcgagaccacctggaacagcttcatcagaatcctgcagctggtgtggcacaccaccgtgtggtacttcagcatcagcaacgtgaagctgcagggccagctggacttcagagacttcgactacagcggcaccagcctgaaggccctgagcatccaccaggtggtgagcgacgtgttcggcttcccccagagctacatctacgagatcttcagcaacatgaacatcaagaacttcaccgtgagcggcaccagaatggtgcacatgctgtgccccagcaagatcagccccttcctgcacctggacttcagcaacaacctgctgaccgacaccgtgttcgagaactgcggccacctgaccgagctggagaccctgatcctgcagatgaaccagctgaaggagctgagcaagatcgccgagatgaccacccagatgaagagcctgcagcagctggacatcagccagaacagcgtgagctacgacgagaagaagggcgactgcagctggaccaagagcctgctgagcctgaacatgagcagcaacatcctgaccgacaccatcttcagatgcatcccccccagaatcaaggtgctggacctgcacagcaacaagatcaagagcatccccaagcaggtggtgaagctggaggccctgcaggagctgaacgtggccttcaacagcctgaccgacctgcccggctgcggcagcttcagcagcctgagcgtgctgatcatcgaccacaacagcgtgagccaccccagcgccgacttcttccagagctgccagaagatgagaagcatcaaggccggcgacaaccccttccagtgcacctgcgagctgggcgagttcgtgaagaacatcgaccaggtgagcagcgaggtgctggagggctggcccgacagctacaagtgcgactaccccgagagctacagaggcaccctgctgaaggacttccacatgagcgagctgagctgcaacatcaccctgctgatcgtgaccatcgtggccaccatgctggtgctggccgtgaccgtgaccagcctgtgcatctacctggacctgccctggtacctgagaatggtgtgccagtggacccagaccagaagaagagccagaaacatccccctggaggagctgcagagaaacctgcagttccacgccttcatcagctacagcggccacgacagcttctgggtgaagaacgagctgctgcccaacctggagaaggagggcatgcagatctgcctgcacgagagaaacttcgtgcccggcaagagcatcgtggagaacatcatcacctgcatcgagaagagctacaagagcatcttcgtgctgagccccaacttcgtgcagagcgagtggtgccactacgagctgtacttcgcccaccacaacctgttccacgagggcagcaacagcctgatcctgatcctgctggagcccatcccccagtacagcatccccagcagctaccacaagctgaagagcctgatggccagaagaacctacctggagtggcccaaggagaagagcaagagaggcctgttctgggccaacctgagagccgccatcaacatcaagctgaccgagcaggccaagaagtga

SEQ ID NO: 9535 - RNA, 2361 nt, synthetic construct
  misc_feature 1..2361: note = derived and/or modified sequence opt5 fromTLR1__Homo_sapiens__AAY85637
  source 1..2361: mol_type = other RNA
atgaccagcatcttccactttgccattatcttcatgctgattctccagatcagaatccaactgtccgaggaatctgagtttcttgtggaccggagcaagaacggcctgatccatgtccccaaagatctctcccagaagacaacgatcctgaatatttctcagaactacatcagcgaactttggacctccgacattctgtctctcagcaaactgcgcatcctgattatctcccacaatagaatccagtatctcgatatcagcgttttcaagtttaaccaagagctggaataccttgacctgtctcataataaactcgtgaagatctcctgccaccctacagtgaacctgaagcatcttgatctgagcttcaatgcttttgacgccctcccgatttgtaaagagttcgggaacatgtctcagctgaagtttctgggactctccaccacacacctggagaaaagctctgtccttcccatcgcgcacctgaatatttccaaggtgctcctggttcttggcgaaacctatggggagaaagaagatcctgagggactgcaggacttcaacacagagagcctccatatcgtgtttcccaccaataaggagttccactttattctggatgtctccgtgaagacggttgctaacctggaactctctaatatcaaatgcgtgctggaagacaacaagtgtagctacttcctttccatcctggccaaactccagaccaatcctaagctgagctctcttacactgaacaacattgagaccacatggaactccttcatccggattctccaactggtctggcataccacggtgtggtattttagcatctctaatgtgaaactgcagggccagctcgatttccgcgactttgattacagcgggacatccctgaaggccctttctattcaccaggtcgttagcgacgtgttcggatttccccaatcctatatctacgaaatcttcagcaatatgaacattaaaaattttaccgtgtctggcacaagaatggtccacatgctgtgcccttccaagatcagcccgttcctccatctggacttttctaacaatctgcttaccgataccgtgttcgagaactgtggccacctcacagagctggaaacgctgattctccagatgaatcagctgaaggagctttccaaaatcgctgaaatgaccacacaaatgaaaagcctgcagcagctcgacatttcccagaactctgttagctacgatgagaaaaagggggactgctcctggaccaaatctctgctgagccttaatatgtccagcaacatcctcacagataccatttttcggtgtattccccctcgcatcaaggtgctggacctgcattctaataagattaaatccatccccaagcaagtcgtgaaactcgaagccctgcaggagcttaacgttgctttcaatagcctgacggatctccctggatgcggctctttttccagcctgtctgtgctgattatcgaccacaacagcgtctcccatcccagcgccgatttcttccagtcttgtcagaagatgagatccattaaagcgggggacaacccgtttcaatgcacatgtgagcttggagagttcgtgaagaatatcgatcaggtcagctccgaagtgctcgaaggctggcctgactcttataagtgcgactaccccgagagctatcgggggaccctgctgaaagattttcacatgtccgaactctcttgcaacatcaccctgcttattgttacaatcgtggccaccatgctggtcctcgctgtgacagttacgagcctgtgtatttacctggaccttccttggtatctccgcatggtgtgccagtggacccagacaagacggcgcgccagaaatatccccctggaggagctgcaacggaacctccagttccacgcttttatttcctactctggacatgatagcttctgggtcaagaatgaactgcttcccaacctggagaaagaaggcatgcagatctgtctccacgagcgcaattttgtgcctggcaagtccatcgtggagaacattattacctgcattgaaaagagctataagtctatcttcgttctgtccccgaattttgtccagagcgagtggtgtcattacgaactgtacttcgcccaccacaacctttttcatgaggggtctaattccctgattctcatcctgctcgaacccatccctcaatatagcattccctcttcctaccacaagctgaaaagccttatggcgagacggacatatctggagtggcctaaggagaaatccaagagaggactcttctgggccaacctgcgcgctgccatcaatattaaactgaccgaacaggctaagaaatga

SEQ ID NO: 9536 - protein, 786 aa, synthetic construct [sequence omitted]

SEQ ID NO: 9537 - RNA, 2361 nt, synthetic construct
  misc_feature 1..2361: note = TLR1__Homo_sapiens__AAY85641
  source 1..2361: mol_type = other RNA
atgactagcatcttccattttgccattatcttcatgttaatacttcagatcagaatacaattatctgaagaaagtgaatttttagttgataggtcaaaaaacggtctcatccacgttcctaaagacctatcccagaaaacaacaatcttaaatatatcgcaaaattatatatctgagctttggacttctgacatcttatcactgtcaaaactgaggattttgataatttctcataatagaatccagtatcttgatatcagtgttttcaaattcaaccaggaattggaatacttggatttgtcccacaacaagttggtgaagatttcttgccaccctactgtgaacctcaagtacttggacctgtcatttaatgcatttgatgccctgcctatatgcaaagagtttggcaatatgtctcaactaaaatttctggggttgagcaccacacacttagaaaaatctagtgtgctgccaattgctcatttgaatatcagcaaggtcttgctggtcttaggagagacttatggggaaaaagaagaccctgagggccttcaagactttaacactgagagtctgcacattgtgttccccacaaacaaagaattccattttattttggatgtgtcagtcaagactgtagcaaatctggaactatctaatatcaaatgtgtgctagaagataacaaatgttcttacttcctaagtattctggcgaaacttcaaacaaatccaaagttatcaagtcttaccttaaacaacattgaaacaacttggaattctttcattaggatcctccagctggtttggcatacaactgtatggtatttctcaatttcaaacgtgaagctacagggtcagctggacttcagagattttgattattctggcacttccttgaaggccttgtctatacaccaagttgtcagcgatgtgttcggttttccgcaaagttatatctatgaaatcttttcgaatatgaacatcaaaaatttcacagtgtctggtacacgcatggtccacatgctttgcccatccaaaattagcccgttcctgcatttggatttttccaataatctcttaacagacacggtttttgaaaattgtgggcaccttactgagttggagacacttattttacaaatgaatcaattaaaagaactttcaaaaatagctgaaatgactacacagatgaagtctctgcaacaattggatattagccagaattctgtaagctatgatgaaaagaaaggagactgttcttggactaaaagtttattaagtttaaatatgtcttcaaatatacttactgacactattttcagatgtttacctcccaggatcaaggtacttgatcttcacagcaataaaataaagagcattcctaaacaagtcgtaaaactggaagctttgcaagaactcaatgttgctttcaattctttaactgaccttcctggatgtggcagctttagcagcctttctgtattgatcattgatcacaattcagtttcccacccatcagctgatttcttccagagctgccagaagatgaggtcaataaaagcaggggacaatccattccaatgtacctgtgagctaggagaatttgtcaaaaatatagaccaagtatcaagtgaagtgttagagggctggcctgattcttataagtgtgactacccggaaagttatagaggaaccctactaaaggactttcacatgtctgaattatcctgcaacataactctgctgatcgtcaccatcgttgccaccatgctggtgttggctgtgactgtgacctccctctgcatctacttggatctgccctggtatctcaggatggtgtgccagtggacccagacccggcgcagggccaggaacatacccttagaagaactccaaagaaatctccagtttcatgcatttatttcatatagtgggcacgattctttctgggtgaagaatgaattattgccaaacctagagaaagaaggtatgcagatttgccttcatgagagaaactttgttcctggcaagagcattgtggaaaatatcatcacctgcattgagaagagttacaagtccatctttgttttgtctcccaactttgtccagagtgaatggtgccattatgaactctactttgcccatcacaatctctttcatgaaggatctaatagcttaatcctgatcttgctggaacccattccgcagtactccattcctagcagttatcacaagctcaaaagtctcatggccaggaggacttatttggaatggcccaaggaaaagagcaaacgtggccttttttgggctaacttaagggcagccattaatattaagctgacagagcaagcaaagaaatag

SEQ ID NO: 9538 - RNA, 2361 nt, synthetic construct
  misc_feature 1..2361: note = derived and/or modified sequence opt1 fromTLR1__Homo_sapiens__AAY85641
  source 1..2361: mol_type = other RNA
atgaccagcatcttccacttcgccatcatcttcatgctgatcctccagatccgcatccagctgtccgaggagagcgagttcctggtggaccggtccaagaacggcctcatccacgtccccaaggacctgagccagaagaccacgatcctgaacatctcccagaactacatcagcgagctctggacctccgacatcctgagcctgtccaagctccgcatcctgatcatcagccacaaccggatccagtacctggacatctccgtgttcaagttcaaccaggagctcgagtacctggacctgagccacaacaagctcgtgaagatctcctgccacccgaccgtcaacctgaagtacctggacctcagcttcaacgccttcgacgcgctgcccatctgcaaggagttcgggaacatgtcccagctgaagttcctcggcctgagcaccacgcacctggagaagtccagcgtgctccccatcgcccacctgaacatctccaaggtgctgctcgtcctgggggagacctacggcgagaaggaggaccccgaggggctgcaggacttcaacaccgagagcctccacatcgtgttcccgaccaacaaggagttccacttcatcctggacgtgagcgtcaagacggtggccaacctggagctctccaacatcaagtgcgtgctggaggacaacaagtgcagctacttcctgtccatcctcgccaagctgcagaccaaccccaagctgagctccctcaccctgaacaacatcgagaccacgtggaacagcttcatccgcatcctgcagctcgtctggcacaccaccgtgtggtacttctccatcagcaacgtgaagctgcagggccagctggacttccgggacttcgactactccggcaccagcctcaaggccctgtccatccaccaggtcgtgagcgacgtgttcgggttcccccagtcctacatctacgagatcttcagcaacatgaacatcaagaacttcacggtctccggcacccgcatggtgcacatgctgtgccccagcaagatctccccgttcctccacctggacttcagcaacaacctgctgaccgacaccgtgttcgagaactgcgggcacctcacggagctggagaccctgatcctccagatgaaccagctgaaggagctgtccaagatcgcggagatgaccacccagatgaagtccctccagcagctggacatcagccagaacagcgtcagctacgacgagaagaagggcgactgctcctggaccaagagcctgctctccctgaacatgagctccaacatcctgaccgacaccatcttccggtgcctcccgccccgcatcaaggtgctggacctgcacagcaacaagatcaagtccatccccaagcaggtcgtgaagctcgaggccctgcaggagctgaacgtggccttcaacagcctcaccgacctgcccgggtgcggctccttcagctccctgagcgtcctcatcatcgaccacaactccgtgagccacccctccgccgacttcttccagagctgccagaagatgcggagcatcaaggcgggcgacaaccccttccagtgcacgtgcgagctgggggagttcgtgaagaacatcgaccaggtctccagcgaggtgctggagggctggcccgactcctacaagtgcgactacccggagagctaccgcgggaccctcctgaaggacttccacatgtccgagctgagctgcaacatcaccctcctgatcgtgaccatcgtcgccacgatgctggtgctcgccgtgaccgtcacctccctgtgcatctacctggacctcccctggtacctgcggatggtgtgccagtggacccagacgcgccggcgcgcccggaacatccccctggaggagctccagcgcaacctgcagttccacgccttcatcagctactccggccacgacagcttctgggtgaagaacgagctgctccccaacctggagaaggagggcatgcagatctgcctgcacgagcggaacttcgtcccggggaagtccatcgtggagaacatcatcacgtgcatcgagaagtcctacaagagcatcttcgtgctcagccccaacttcgtccagtccgagtggtgccactacgagctgtacttcgcgcaccacaacctgttccacgagggcagcaactccctcatcctgatcctgctcgagcccatcccccagtacagcatcccgtccagctaccacaagctcaagagcctgatggcccgccggacctacctggagtggcccaaggagaagtccaagcgcgggctgttctgggccaacctgcgggccgccatcaacatcaagctcaccgagcaggcgaagaagtga

SEQ ID NO: 9539 - RNA, 2361 nt, synthetic construct
  misc_feature 1..2361: note = derived and/or modified sequence opt2 fromTLR1__Homo_sapiens__AAY85641
  source 1..2361: mol_type = other RNA
atgacctccatcttccacttcgccatcatcttcatgctcatcctccagatccgcatccagctctccgaggagtccgagttcctcgtcgaccgctccaagaacggcctcatccacgtccccaaggacctctcccagaagaccaccatcctcaacatctcccagaactacatctccgagctctggacctccgacatcctctccctctccaagctccgcatcctcatcatctcccacaaccgcatccagtacctcgacatctccgtcttcaagttcaaccaggagctcgagtacctcgacctctcccacaacaagctcgtcaagatctcctgccaccccaccgtcaacctcaagtacctcgacctctccttcaacgccttcgacgccctccccatctgcaaggagttcggcaacatgtcccagctcaagttcctcggcctctccaccacccacctcgagaagtcctccgtcctccccatcgcccacctcaacatctccaaggtcctcctcgtcctcggcgagacctacggcgagaaggaggaccccgagggcctccaggacttcaacaccgagtccctccacatcgtcttccccaccaacaaggagttccacttcatcctcgacgtctccgtcaagaccgtcgccaacctcgagctctccaacatcaagtgcgtcctcgaggacaacaagtgctcctacttcctctccatcctcgccaagctccagaccaaccccaagctctcctccctcaccctcaacaacatcgagaccacctggaactccttcatccgcatcctccagctcgtctggcacaccaccgtctggtacttctccatctccaacgtcaagctccagggccagctcgacttccgcgacttcgactactccggcacctccctcaaggccctctccatccaccaggtcgtctccgacgtcttcggcttcccccagtcctacatctacgagatcttctccaacatgaacatcaagaacttcaccgtctccggcacccgcatggtccacatgctctgcccctccaagatctcccccttcctccacctcgacttctccaacaacctcctcaccgacaccgtcttcgagaactgcggccacctcaccgagctcgagaccctcatcctccagatgaaccagctcaaggagctctccaagatcgccgagatgaccacccagatgaagtccctccagcagctcgacatctcccagaactccgtctcctacgacgagaagaagggcgactgctcctggaccaagtccctcctctccctcaacatgtcctccaacatcctcaccgacaccatcttccgctgcctccccccccgcatcaaggtcctcgacctccactccaacaagatcaagtccatccccaagcaggtcgtcaagctcgaggccctccaggagctcaacgtcgccttcaactccctcaccgacctccccggctgcggctccttctcctccctctccgtcctcatcatcgaccacaactccgtctcccacccctccgccgacttcttccagtcctgccagaagatgcgctccatcaaggccggcgacaaccccttccagtgcacctgcgagctcggcgagttcgtcaagaacatcgaccaggtctcctccgaggtcctcgagggctggcccgactcctacaagtgcgactaccccgagtcctaccgcggcaccctcctcaaggacttccacatgtccgagctctcctgcaacatcaccctcctcatcgtcaccatcgtcgccaccatgctcgtcctcgccgtcaccgtcacctccctctgcatctacctcgacctcccctggtacctccgcatggtctgccagtggacccagacccgccgccgcgcccgcaacatccccctcgaggagctccagcgcaacctccagttccacgccttcatctcctactccggccacgactccttctgggtcaagaacgagctcctccccaacctcgagaaggagggcatgcagatctgcctccacgagcgcaacttcgtccccggcaagtccatcgtcgagaacatcatcacctgcatcgagaagtcctacaagtccatcttcgtcctctcccccaacttcgtccagtccgagtggtgccactacgagctctacttcgcccaccacaacctcttccacgagggctccaactccctcatcctcatcctcctcgagcccatcccccagtactccatcccctcctcctaccacaagctcaagtccctcatggcccgccgcacctacctcgagtggcccaaggagaagtccaagcgcggcctcttctgggccaacctccgcgccgccatcaacatcaagctcaccgagcaggccaagaagtga

SEQ ID NO: 9540 - RNA, 2361 nt, synthetic construct
  misc_feature 1..2361: note = derived and/or modified sequence opt3 fromTLR1__Homo_sapiens__AAY85641
  source 1..2361: mol_type = other RNA
atgaccagcatcttccactttgccattatattcatgctgatcctccagattagaatccaactttccgaggaatctgagtttctggtggacaggtcaaagaacggcttgattcatgtccccaaagatttaagtcagaagacaactatcctgaatataagccagaactacatctccgaactatggacgtctgacattctctcgctgtcaaaacttcggatcctgattatcagccacaatcgcatacagtatttggatattagtgttttcaagtttaaccaagagctcgaatacctggacctgtcccataataaactcgtgaagatctcttgccaccctaccgtaaacttaaagtatctggatcttagcttcaatgcttttgacgcattgccaatttgtaaagagttcgggaacatgtcccagctgaagtttctaggactctcaacaactcatctggagaaaagtagcgtgcttccgatcgcccacctgaatatctctaaggtcttgctcgtgctgggtgaaacctacggcgagaaagaagatcccgaggggttacaggacttcaacacagagtccctgcacattgtttttcctaccaataaggagttccattttatactcgatgtgtcagtcaagactgtggcgaaccttgaactgagcaatatcaaatgcgtattggaagacaacaagtgtagttatttcctatctattctggctaaactccagacaaatccaaagctgtccagccttaccctgaacaacatcgagacgacttggaatagcttcatacgaattttgcaactcgtttggcacaccacagtgtggtacttttctatctccaacgtcaaactgcagggacagttagatttccgtgactttgattattcaggcacttcactgaaggccctaagcatccatcaggtggtgtccgacgtcttcggttttccccaatcttacatttacgaaatcttcagcaatatgaacattaaaaattttaccgtttcagggacaagaatggtgcacatgctctgccctagtaagatatccccattcctgcaccttgactttagcaacaatttgctgaccgatacggtattcgagaactgtggacatctcactgagctggaaacacttatcctgcagatgaatcagttgaaggagctctctaaaattgcagaaatgaccactcaaatgaagtcactgcagcagttagacatcagtcagaacagcgtgtcctatgatgagaaaaagggcgactgctcttggacaaaatcgctgctaagcctcaatatgtcctcaaacatcctgaccgatacgatttttaggtgtcttccccctcggataaaggtcttggacctgcacagtaataagatcaaatctattccaaagcaagtggttaaactcgaagccctgcaggagttaaacgtggctttcaatagcctgaccgatcttccgggctgcgggtcctttagtagcttgtctgtcctcatcattgaccataactccgtgagtcaccccagcgcagatttcttccagtcttgtcagaagatgcgctccatcaaagccggagacaacccttttcaatgcacatgtgagctgggtgagttcgtaaagaatatagatcaggtttcaagtgaagtgctagaaggctggccagacagctacaagtgcgactatcccgagtcgtacagagggactctgctcaaagattttcatatgtccgaactgtcttgcaacatcacccttttgattgtcacaatcgtggctactatgctggtcttagccgtgaccgttacaagcctctgtatttatctggaccttccttggtacctgaggatggtgtgccagtggacccagactcggcgccgagcgagaaatatcccattggaggagctccaaaggaacctgcagttccacgcatttatatcatatagtggacacgattccttctgggtaaagaatgaactactgcccaacctcgagaaagaaggcatgcagatttgtctgcatgagcggaattttgtcccgggtaagtctatcgtggagaacattatcacgtgcatagaaaaatcgtacaagtccatcttcgttctttcacctaattttgtgcagagcgagtggtgtcactacgaattgtatttcgcccatcacaacctgtttcacgaggggagtaattctttaattctcatcctgcttgaacccattccacaatactccatccctagctcgtatcataagctgaaatcactaatggctcgtcgcacatacctcgagtggcccaaggagaaatctaagagaggactgttctgggccaacttgagggcagctataaatattaaactgaccgaacaggccaagaaatga

SEQ ID NO: 9541 - RNA, 2361 nt, synthetic construct
  misc_feature 1..2361: note = derived and/or modified sequence opt4 fromTLR1__Homo_sapiens__AAY85641
  source 1..2361: mol_type = other RNA
atgaccagcatcttccacttcgccatcatcttcatgctgatcctgcagatcagaatccagctgagcgaggagagcgagttcctggtggacagaagcaagaacggcctgatccacgtgcccaaggacctgagccagaagaccaccatcctgaacatcagccagaactacatcagcgagctgtggaccagcgacatcctgagcctgagcaagctgagaatcctgatcatcagccacaacagaatccagtacctggacatcagcgtgttcaagttcaaccaggagctggagtacctggacctgagccacaacaagctggtgaagatcagctgccaccccaccgtgaacctgaagtacctggacctgagcttcaacgccttcgacgccctgcccatctgcaaggagttcggcaacatgagccagctgaagttcctgggcctgagcaccacccacctggagaagagcagcgtgctgcccatcgcccacctgaacatcagcaaggtgctgctggtgctgggcgagacctacggcgagaaggaggaccccgagggcctgcaggacttcaacaccgagagcctgcacatcgtgttccccaccaacaaggagttccacttcatcctggacgtgagcgtgaagaccgtggccaacctggagctgagcaacatcaagtgcgtgctggaggacaacaagtgcagctacttcctgagcatcctggccaagctgcagaccaaccccaagctgagcagcctgaccctgaacaacatcgagaccacctggaacagcttcatcagaatcctgcagctggtgtggcacaccaccgtgtggtacttcagcatcagcaacgtgaagctgcagggccagctggacttcagagacttcgactacagcggcaccagcctgaaggccctgagcatccaccaggtggtgagcgacgtgttcggcttcccccagagctacatctacgagatcttcagcaacatgaacatcaagaacttcaccgtgagcggcaccagaatggtgcacatgctgtgccccagcaagatcagccccttcctgcacctggacttcagcaacaacctgctgaccgacaccgtgttcgagaactgcggccacctgaccgagctggagaccctgatcctgcagatgaaccagctgaaggagctgagcaagatcgccgagatgaccacccagatgaagagcctgcagcagctggacatcagccagaacagcgtgagctacgacgagaagaagggcgactgcagctggaccaagagcctgctgagcctgaacatgagcagcaacatcctgaccgacaccatcttcagatgcctgccccccagaatcaaggtgctggacctgcacagcaacaagatcaagagcatccccaagcaggtggtgaagctggaggccctgcaggagctgaacgtggccttcaacagcctgaccgacctgcccggctgcggcagcttcagcagcctgagcgtgctgatcatcgaccacaacagcgtgagccaccccagcgccgacttcttccagagctgccagaagatgagaagcatcaaggccggcgacaaccccttccagtgcacctgcgagctgggcgagttcgtgaagaacatcgaccaggtgagcagcgaggtgctggagggctggcccgacagctacaagtgcgactaccccgagagctacagaggcaccctgctgaaggacttccacatgagcgagctgagctgcaacatcaccctgctgatcgtgaccatcgtggccaccatgctggtgctggccgtgaccgtgaccagcctgtgcatctacctggacctgccctggtacctgagaatggtgtgccagtggacccagaccagaagaagagccagaaacatccccctggaggagctgcagagaaacctgcagttccacgccttcatcagctacagcggccacgacagcttctgggtgaagaacgagctgctgcccaacctggagaaggagggcatgcagatctgcctgcacgagagaaacttcgtgcccggcaagagcatcgtggagaacatcatcacctgcatcgagaagagctacaagagcatcttcgtgctgagccccaacttcgtgcagagcgagtggtgccactacgagctgtacttcgcccaccacaacctgttccacgagggcagcaacagcctgatcctgatcctgctggagcccatcccccagtacagcatccccagcagctaccacaagctgaagagcctgatggccagaagaacctacctggagtggcccaaggagaagagcaagagaggcctgttctgggccaacctgagagccgccatcaacatcaagctgaccgagcaggccaagaagtga

SEQ ID NO: 9542 - RNA, 2361 nt, synthetic construct
  misc_feature 1..2361: note = derived and/or modified sequence opt5 fromTLR1__Homo_sapiens__AAY85641
  source 1..2361: mol_type = other RNA
atgaccagcatcttccactttgccattatcttcatgctgattctccagatccggattcaactgtccgaggaatctgagtttcttgtggacagaagcaagaacggcctgatccatgtccccaaagatctctcccagaagacaacgatcctgaatatttctcagaactacatcagcgaactttggacctccgacattctgtctctcagcaaactgcgcatcctgattatctcccacaatagaatccagtatctcgatattagcgttttcaagtttaaccaagagctggaataccttgacctgtctcataataaactcgtgaagatctcctgccaccctacagtgaacctgaagtatcttgatctgagcttcaatgcttttgacgccctcccgatttgtaaagagttcgggaacatgtctcagctgaagtttctgggactctccaccacacatctggagaaaagctctgtccttcccatcgcgcacctgaatatttccaaggtgctcctggttcttggcgaaacctacggggagaaagaagatcctgagggactgcaggacttcaacacagagagcctccacatcgtgtttcccaccaataaggagttccattttattctggatgtctccgtgaagacggttgctaacctggaactctctaatatcaaatgcgtgctggaagacaacaagtgtagctatttcctttccatcctggccaaactccagaccaatcctaagctgagctctcttacactgaacaacattgagaccacatggaatagcttcatccggattctccaactggtctggcacaccacggtgtggtactttagcatctctaacgtgaaactgcagggccagctcgatttccgcgactttgattatagcgggacatccctgaaggccctttctattcatcaggtcgttagcgacgtgttcggatttccccaatcctacatctacgaaatcttcagcaatatgaacattaaaaattttaccgtgtctggcacaagaatggtccacatgctgtgcccttccaagatcagcccgttcctccacctggacttttctaacaatctgcttaccgataccgtgttcgagaactgtggccatctcacagagctggaaacgctgattctccagatgaatcagctgaaggagctttccaaaatcgctgaaatgaccacacaaatgaagtccctgcagcagctcgacatttcccagaactctgttagctatgatgagaaaaagggggactgctcctggaccaaatctctgctgagccttaatatgtccagcaacatcctcacagataccatttttcggtgtctgccccctcgcatcaaggtgctggacctccactctaataagatcaaatccattcccaagcaagtcgtgaaactggaagcccttcaggagctgaacgttgctttcaatagcctcacggatctgcctggatgcggctctttttccagcctgtctgtgcttatcattgaccataacagcgtctcccaccccagcgccgatttcttccagtcttgtcagaagatgagatccatcaaagcgggggacaacccgtttcaatgcacatgtgagctcggagagttcgtgaagaatattgatcaggtcagctccgaagtgctggaaggctggcctgactcttacaagtgcgactatcccgagagctaccgggggaccctgctcaaagattttcatatgtccgaactgtcttgcaacatcacccttctgatcgttacaattgtggccaccatgctcgtcctggctgtgacagttacgagcctgtgtatctatcttgacctcccttggtacctgcgcatggtgtgccagtggacccagacaagacggcgcgccagaaatattcccctggaggagctccaacggaacctgcagttccacgcttttatctcctattctggacacgatagcttctgggtcaagaatgaacttctgcccaacctcgagaaagaaggcatgcagatttgtctgcatgagcgcaattttgtgcctggcaagtccatcgtggagaacatcattacctgcatcgaaaagagctacaagtctattttcgttctgtccccgaattttgtccagagcgagtggtgtcactacgaactttatttcgcccatcacaacctgtttcacgaggggtctaattccctcatcctgattctcctggaacccatccctcaatacagcatcccctcttcctatcataaacttaaaagcctgatggcgagacggacatacctcgagtggcctaaggagaaatccaagagaggactgttctgggccaacctgcgcgctgccattaatatcaaacttaccgaacaggctaagaaatga

SEQ ID NO: 9543 - protein, 786 aa, synthetic construct [sequence omitted]

SEQ ID NO: 9544 - RNA, 2361 nt, synthetic construct
  misc_feature 1..2361: note = TLR1__Homo_sapiens__AAY85642
  source 1..2361: mol_type = other RNA
atgactagcatcttccattttgccattatcttcatgttaatacttcagatcagaatacaattatctgaagaaagtgaatttttagttgataggtcaaaaaacggtctcatccatgttcctaaagacctatcccagaaaacaacaatcttaaatatatcgcaaaattatatatctgagctttggacttctgacatcttatcactgtcaaaactgaggattttgataatttctcataatagaatccagtatcttgatatcagtgttttcaaattcaaccaggaattggaatacttggatttgtcccacaacaagttggtgaagatttcttgccaccctactgtgaacctcaagcacttggacctgtcatttaatgcatttgatgccctgcctatatgcaaagagtttggcaatatgtctcaactaaaatttctggggttgagcaccacacacttagaaaaatctagtgtgctgccaattgctcatttgaatatcagcaaggtcttgctggtcttaggagagacttatggggaaaaagaagaccctgagggccttcaagactttaacactgagagtctgcacattgtgttccccacaaacaaagaattccattttattttggatgtgtcagtcaagactgtagcaaatctggaactatctaatatcaaatgtgtgctagaagataacaaatgttcttacttcctaagtattctggcgaaacttcaaacaaatccaaagttatcaagtcttaccttaaacaacattgaaacaacttggaattctttcattaggatcctccagctggtttggcatacaactgtatggtatttctcaatttcaaacgtgaagctacagggtcagctggacttcagagattttgattattctggcacttccttgaaggccttgtctatactccaagttgtcagcgatgtgttcggttttccgcaaagttatatctatgaaatcttttcgaatatgaacatcaaaaatttcacagtgtctggtacacgcatggtccacatgctttgcccatccaaaattagcccgttcctgcatttggatttttccaataatctcttaacagacacggtttttgaaaattgtgggcaccttactgagttggagacacttattttacaaatgaatcaattaaaagaactttcaaaaatagctgaaatgactacacagatgaagtctctgcaacaattggatattagccagaattctgtaagctatgatgaaaagaaaggagactgttcttggactaaaagtttattaagtttaaatatgtcttcaaatatacttactgacactattttcagatgtttacctcccaggatcaaggtacttgatcttcacagcaataaaataaagagcattcctaaacaagtcgtaaaactggaagctttgcaagaactcaatgttgctttcaattctttaactgaccttcctggatgtggcagctttagcagcctttctgtattgatcattgatcacaattcagtttcccacccatcagctgatttcttccagagctgccagaagatgaggtcaataaaagcaggggacaatccattccaatgtacctgtgagctaggagaatttgtcaaaaatatagaccaagtatcaagtgaagtgttagagggctggcctgattcttataagtgtgactacccggaaagttatagaggaaccctactaaaggactttcacatgtctgaattatcctgcaacataactctgctgatcgtcaccatcgttgccaccatgctggtgttggctgtgactgtgacctccctctgcatctacttggatctgccctggtatctcaggatggtgtgccagtggacccagacccggcgcagggccaggaacatacccttagaagaactccaaagaaatctccagtttcatgcatttatttcatatagtgggcacgattctttctgggtgaagaatgaattattgccaaacctagagaaagaaggtatgcagatttgccttcatgagagaaactttgttcctggcaagagcattgtggaaaatatcatcacctgcattgagaagagttacaagtccatctttgttttgtctcccaactttgtccagagtgaatggtgccattatgaactctactttgcccatcacaatctctttcatgaaggatctaatagcttaatcctgatcttgctggaacccattccgcagtactccattcctagcagttatcacaagctcaaaagtctcatggccaggaggacttatttggaatggcccaaggaaaagagcaaacgtggccttttttgggctaacttaagggcagccattaatattaagctgacagagcaagcaaagaaatag

SEQ ID NO: 9545 - RNA, 2361 nt, synthetic construct
  misc_feature 1..2361: note = derived and/or modified sequence opt1 fromTLR1__Homo_sapiens__AAY85642
  source 1..2361: mol_type = other RNA
atgaccagcatcttccacttcgccatcatcttcatgctgatcctccagatccgcatccagctgtccgaggagagcgagttcctggtggaccggtccaagaacggcctcatccacgtccccaaggacctgagccagaagaccacgatcctgaacatctcccagaactacatcagcgagctctggacctccgacatcctgagcctgtccaagctccgcatcctgatcatcagccacaaccggatccagtacctggacatctccgtgttcaagttcaaccaggagctcgagtacctggacctgagccacaacaagctcgtgaagatctcctgccacccgaccgtcaacctgaagcacctggacctcagcttcaacgccttcgacgcgctgcccatctgcaaggagttcgggaacatgtcccagctgaagttcctcggcctgagcaccacgcacctggagaagtccagcgtgctccccatcgcccacctgaacatctccaaggtgctgctcgtcctgggggagacctacggcgagaaggaggaccccgaggggctgcaggacttcaacaccgagagcctccacatcgtgttcccgaccaacaaggagttccacttcatcctggacgtgagcgtcaagacggtggccaacctggagctctccaacatcaagtgcgtgctggaggacaacaagtgcagctacttcctgtccatcctcgccaagctgcagaccaaccccaagctgagctccctcaccctgaacaacatcgagaccacgtggaacagcttcatccgcatcctgcagctcgtctggcacaccaccgtgtggtacttctccatcagcaacgtgaagctgcagggccagctggacttccgggacttcgactactccggcaccagcctcaaggccctgtccatcctgcaggtcgtgagcgacgtgttcgggttcccccagtcctacatctacgagatcttcagcaacatgaacatcaagaacttcacggtctccggcacccgcatggtgcacatgctctgccccagcaagatctccccgttcctgcacctggacttcagcaacaacctgctcaccgacaccgtgttcgagaactgcgggcacctgacggagctggagaccctcatcctgcagatgaaccagctgaaggagctctccaagatcgcggagatgaccacccagatgaagtccctgcagcagctggacatcagccagaacagcgtcagctacgacgagaagaagggcgactgctcctggaccaagagcctcctgtccctgaacatgagctccaacatcctcaccgacaccatcttccggtgcctgccgccccgcatcaaggtgctggacctccacagcaacaagatcaagtccatccccaagcaggtcgtgaagctggaggccctgcaggagctcaacgtggccttcaacagcctgaccgacctgcccgggtgcggctccttcagctccctcagcgtcctgatcatcgaccacaactccgtgagccacccctccgccgacttcttccagagctgccagaagatgcggagcatcaaggcgggcgacaaccccttccagtgcacgtgcgagctgggggagttcgtgaagaacatcgaccaggtctccagcgaggtgctcgagggctggcccgactcctacaagtgcgactacccggagagctaccgcgggaccctgctgaaggacttccacatgtccgagctcagctgcaacatcaccctgctgatcgtgaccatcgtcgccacgatgctcgtgctggccgtgaccgtcacctccctgtgcatctacctcgacctgccctggtacctgcggatggtgtgccagtggacccagacgcgccggcgcgcccggaacatccccctcgaggagctgcagcgcaacctgcagttccacgccttcatcagctactccggccacgacagcttctgggtgaagaacgagctcctgcccaacctggagaaggagggcatgcagatctgcctccacgagcggaacttcgtcccggggaagtccatcgtggagaacatcatcacgtgcatcgagaagtcctacaagagcatcttcgtgctgagccccaacttcgtccagtccgagtggtgccactacgagctgtacttcgcgcaccacaacctcttccacgagggcagcaactccctgatcctgatcctcctggagcccatcccccagtacagcatcccgtccagctaccacaagctcaagagcctgatggcccgccggacctacctggagtggcccaaggagaagtccaagcgcgggctgttctgggccaacctccgggccgccatcaacatcaagctgaccgagcaggcgaagaagtga

SEQ ID NO: 9546 - RNA, 2361 nt, synthetic construct
  misc_feature 1..2361: note = derived and/or modified sequence opt2 fromTLR1__Homo_sapiens__AAY85642
  source 1..2361: mol_type = other RNA
atgacctccatcttccacttcgccatcatcttcatgctcatcctccagatccgcatccagctctccgaggagtccgagttcctcgtcgaccgctccaagaacggcctcatccacgtccccaaggacctctcccagaagaccaccatcctcaacatctcccagaactacatctccgagctctggacctccgacatcctctccctctccaagctccgcatcctcatcatctcccacaaccgcatccagtacctcgacatctccgtcttcaagttcaaccaggagctcgagtacctcgacctctcccacaacaagctcgtcaagatctcctgccaccccaccgtcaacctcaagcacctcgacctctccttcaacgccttcgacgccctccccatctgcaaggagttcggcaacatgtcccagctcaagttcctcggcctctccaccacccacctcgagaagtcctccgtcctccccatcgcccacctcaacatctccaaggtcctcctcgtcctcggcgagacctacggcgagaaggaggaccccgagggcctccaggacttcaacaccgagtccctccacatcgtcttccccaccaacaaggagttccacttcatcctcgacgtctccgtcaagaccgtcgccaacctcgagctctccaacatcaagtgcgtcctcgaggacaacaagtgctcctacttcctctccatcctcgccaagctccagaccaaccccaagctctcctccctcaccctcaacaacatcgagaccacctggaactccttcatccgcatcctccagctcgtctggcacaccaccgtctggtacttctccatctccaacgtcaagctccagggccagctcgacttccgcgacttcgactactccggcacctccctcaaggccctctccatcctccaggtcgtctccgacgtcttcggcttcccccagtcctacatctacgagatcttctccaacatgaacatcaagaacttcaccgtctccggcacccgcatggtccacatgctctgcccctccaagatctcccccttcctccacctcgacttctccaacaacctcctcaccgacaccgtcttcgagaactgcggccacctcaccgagctcgagaccctcatcctccagatgaaccagctcaaggagctctccaagatcgccgagatgaccacccagatgaagtccctccagcagctcgacatctcccagaactccgtctcctacgacgagaagaagggcgactgctcctggaccaagtccctcctctccctcaacatgtcctccaacatcctcaccgacaccatcttccgctgcctccccccccgcatcaaggtcctcgacctccactccaacaagatcaagtccatccccaagcaggtcgtcaagctcgaggccctccaggagctcaacgtcgccttcaactccctcaccgacctccccggctgcggctccttctcctccctctccgtcctcatcatcgaccacaactccgtctcccacccctccgccgacttcttccagtcctgccagaagatgcgctccatcaaggccggcgacaaccccttccagtgcacctgcgagctcggcgagttcgtcaagaacatcgaccaggtctcctccgaggtcctcgagggctggcccgactcctacaagtgcgactaccccgagtcctaccgcggcaccctcctcaaggacttccacatgtccgagctctcctgcaacatcaccctcctcatcgtcaccatcgtcgccaccatgctcgtcctcgccgtcaccgtcacctccctctgcatctacctcgacctcccctggtacctccgcatggtctgccagtggacccagacccgccgccgcgcccgcaacatccccctcgaggagctccagcgcaacctccagttccacgccttcatctcctactccggccacgactccttctgggtcaagaacgagctcctccccaacctcgagaaggagggcatgcagatctgcctccacgagcgcaacttcgtccccggcaagtccatcgtcgagaacatcatcacctgcatcgagaagtcctacaagtccatcttcgtcctctcccccaacttcgtccagtccgagtggtgccactacgagctctacttcgcccaccacaacctcttccacgagggctccaactccctcatcctcatcctcctcgagcccatcccccagtactccatcccctcctcctaccacaagctcaagtccctcatggcccgccgcacctacctcgagtggcccaaggagaagtccaagcgcggcctcttctgggccaacctccgcgccgccatcaacatcaagctcaccgagcaggccaagaagtga

SEQ ID NO: 9547 - RNA, 2361 nt, synthetic construct
  misc_feature 1..2361: note = derived and/or modified sequence opt3 fromTLR1__Homo_sapiens__AAY85642
  source 1..2361: mol_type = other RNA
atgaccagcatcttccactttgccattatattcatgctgatcctccagattagaatccaactttccgaggaatctgagtttctggtggacaggtcaaagaacggcttgattcatgtccccaaagatttaagtcagaagacaactatcctgaatataagccagaactacatctccgaactatggacgtctgacattctctcgctgtcaaaacttcggatcctgattatcagccacaatcgcatacagtatttggatattagtgttttcaagtttaaccaagagctcgaatacctggacctgtcccataataaactcgtgaagatctcttgccaccctaccgtaaacttaaagcatctggatcttagcttcaatgcttttgacgcattgccaatttgtaaagagttcgggaacatgtcccagctgaagtttctaggactctcaacaactcacctggagaaaagtagcgtgcttccgatcgcccacctgaatatctctaaggtcttgctcgtgctgggtgaaacctatggcgagaaagaagatcccgaggggttacaggacttcaacacagagtccctgcatattgtttttcctaccaataaggagttccactttatactcgatgtgtcagtcaagactgtggcgaaccttgaactgagcaatatcaaatgcgtattggaagacaacaagtgtagttacttcctatctattctggctaaactccagacaaatccaaagctgtccagccttaccctgaacaacatcgagacgacttggaatagtttcatacgaattttgcaactcgtttggcataccacagtgtggtatttttctatctccaacgtcaaactgcagggacagttagatttccgtgactttgattactcaggcacttcgctgaaggccctaagcatcctccaggtggtgtccgacgtcttcggttttccccaatcttatatttacgaaatcttcagcaatatgaacattaaaaattttaccgtttcagggacaagaatggtgcacatgctgtgccctagtaagatatccccattccttcacttggactttagcaacaatctgctcaccgatacggtattcgagaactgtggacatctgactgagcttgaaacactgatcttgcagatgaatcagctcaaggagctgtctaaaattgcagaaatgaccactcaaatgaagtcattacagcagctggacatcagtcagaacagcgtgtcctacgatgagaaaaagggcgactgctcttggacaaaatcgctactcagcctgaatatgtcctcaaacatccttaccgatacgatttttaggtgtttgccccctcggataaaggtcctggacctccacagtaataagatcaaatctattccaaagcaagtggttaaactggaagccttacaggagctgaacgtggctttcaatagccttaccgatttgccgggctgcgggtccttttcaagcctctctgtcctgatcattgaccataactccgtgagtcaccccagcgcagatttcttccagtcttgtcagaagatgcgctccatcaaagccggagacaacccttttcaatgcacatgtgagctaggtgagttcgtaaagaatatagatcaggtttcaagtgaagtgctggaaggctggccagacagctataagtgcgactaccccgagtcgtatagagggactctcctgaaagattttcatatgtccgaactttcttgcaacatcaccttgctgattgtcacaatcgtggctactatgttagtcctcgccgtgaccgttacaagcctgtgtatttaccttgacctgccttggtatttgaggatggtgtgccagtggacccagactcggcgccgagcgagaaatatcccactcgaggagctgcaaaggaacctacagttccacgcatttatatcatacagtggacacgattccttctgggtaaagaatgaactgctccccaacctggagaaagaaggcatgcagatttgtcttcatgagcggaattttgtcccgggtaagtctatcgtggagaacattatcacgtgcatagagaaaagctataagtccatcttcgttttgtcacctaattttgtgcagagcgaatggtgtcactacgaactgtacttcgcccatcacaacttatttcacgaggggagtaattctctcattctgatccttctggaacccattccacaatattccatccctagctcgtaccataagctaaaatcactcatggctcgtcgcacatatctggagtggcccaaggagaaatctaagagaggattgttctgggccaacctgagggcagctataaatattaaattaaccgaacaggccaagaaatga

SEQ ID NO: 9548 - RNA, 2361 nt, synthetic construct
  misc_feature 1..2361: note = derived and/or modified sequence opt4 fromTLR1__Homo_sapiens__AAY85642
  source 1..2361: mol_type = other RNA
atgaccagcatcttccacttcgccatcatcttcatgctgatcctgcagatcagaatccagctgagcgaggagagcgagttcctggtggacagaagcaagaacggcctgatccacgtgcccaaggacctgagccagaagaccaccatcctgaacatcagccagaactacatcagcgagctgtggaccagcgacatcctgagcctgagcaagctgagaatcctgatcatcagccacaacagaatccagtacctggacatcagcgtgttcaagttcaaccaggagctggagtacctggacctgagccacaacaagctggtgaagatcagctgccaccccaccgtgaacctgaagcacctggacctgagcttcaacgccttcgacgccctgcccatctgcaaggagttcggcaacatgagccagctgaagttcctgggcctgagcaccacccacctggagaagagcagcgtgctgcccatcgcccacctgaacatcagcaaggtgctgctggtgctgggcgagacctacggcgagaaggaggaccccgagggcctgcaggacttcaacaccgagagcctgcacatcgtgttccccaccaacaaggagttccacttcatcctggacgtgagcgtgaagaccgtggccaacctggagctgagcaacatcaagtgcgtgctggaggacaacaagtgcagctacttcctgagcatcctggccaagctgcagaccaaccccaagctgagcagcctgaccctgaacaacatcgagaccacctggaacagcttcatcagaatcctgcagctggtgtggcacaccaccgtgtggtacttcagcatcagcaacgtgaagctgcagggccagctggacttcagagacttcgactacagcggcaccagcctgaaggccctgagcatcctgcaggtggtgagcgacgtgttcggcttcccccagagctacatctacgagatcttcagcaacatgaacatcaagaacttcaccgtgagcggcaccagaatggtgcacatgctgtgccccagcaagatcagccccttcctgcacctggacttcagcaacaacctgctgaccgacaccgtgttcgagaactgcggccacctgaccgagctggagaccctgatcctgcagatgaaccagctgaaggagctgagcaagatcgccgagatgaccacccagatgaagagcctgcagcagctggacatcagccagaacagcgtgagctacgacgagaagaagggcgactgcagctggaccaagagcctgctgagcctgaacatgagcagcaacatcctgaccgacaccatcttcagatgcctgccccccagaatcaaggtgctggacctgcacagcaacaagatcaagagcatccccaagcaggtggtgaagctggaggccctgcaggagctgaacgtggccttcaacagcctgaccgacctgcccggctgcggcagcttcagcagcctgagcgtgctgatcatcgaccacaacagcgtgagccaccccagcgccgacttcttccagagctgccagaagatgagaagcatcaaggccggcgacaaccccttccagtgcacctgcgagctgggcgagttcgtgaagaacatcgaccaggtgagcagcgaggtgctggagggctggcccgacagctacaagtgcgactaccccgagagctacagaggcaccctgctgaaggacttccacatgagcgagctgagctgcaacatcaccctgctgatcgtgaccatcgtggccaccatgctggtgctggccgtgaccgtgaccagcctgtgcatctacctggacctgccctggtacctgagaatggtgtgccagtggacccagaccagaagaagagccagaaacatccccctggaggagctgcagagaaacctgcagttccacgccttcatcagctacagcggccacgacagcttctgggtgaagaacgagctgctgcccaacctggagaaggagggcatgcagatctgcctgcacgagagaaacttcgtgcccggcaagagcatcgtggagaacatcatcacctgcatcgagaagagctacaagagcatcttcgtgctgagccccaacttcgtgcagagcgagtggtgccactacgagctgtacttcgcccaccacaacctgttccacgagggcagcaacagcctgatcctgatcctgctggagcccatcccccagtacagcatccccagcagctaccacaagctgaagagcctgatggccagaagaacctacctggagtggcccaaggagaagagcaagagaggcctgttctgggccaacctgagagccgccatcaacatcaagctgaccgagcaggccaagaagtga

SEQ ID NO: 9549 - RNA, 2361 nt, synthetic construct
  misc_feature 1..2361: note = derived and/or modified sequence opt5 fromTLR1__Homo_sapiens__AAY85642
  source 1..2361: mol_type = other RNA
atgaccagcatcttccactttgccattatcttcatgctgattctccagatccggattcaactgtccgaggaatctgagtttcttgtggacagaagcaagaacggcctgatccatgtccccaaagatctctcccagaagacaacgatcctgaatatttctcagaactacatcagcgaactttggacctccgacattctgtctctcagcaaactgcgcatcctgattatctcccacaatagaatccagtatctcgatattagcgttttcaagtttaaccaagagctggaataccttgacctgtctcataataaactcgtgaagatctcctgccaccctacagtgaacctgaagcatcttgatctgagcttcaatgcttttgacgccctcccgatttgtaaagagttcgggaacatgtctcagctgaagtttctgggactctccaccacacacctggagaaaagctctgtccttcccatcgcgcacctgaatatttccaaggtgctcctggttcttggcgaaacctatggggagaaagaagatcctgagggactgcaggacttcaacacagagagcctccatatcgtgtttcccaccaataaggagttccactttattctggatgtctccgtgaagacggttgctaacctggaactctctaatatcaaatgcgtgctggaagacaacaagtgtagctacttcctttccatcctggccaaactccagaccaatcctaagctgagctctcttacactgaacaacattgagaccacatggaactccttcatccggattctccaactggtctggcataccacggtgtggtattttagcatctctaatgtgaaactgcagggccagctcgatttccgcgactttgattacagcgggacatccctgaaggccctttctattctgcaggtcgttagcgacgtgttcggatttccccaatcctatatctacgaaatcttcagcaatatgaacattaaaaattttaccgtgtctggcacaagaatggtccacatgctctgcccttccaagatcagcccgttcctgcacctggacttttctaacaatcttctcaccgataccgtgttcgagaactgtggccatctgacagagctggaaacgctcattctgcagatgaatcagcttaaggagctgtccaaaatcgctgaaatgaccacacaaatgaaaagcctccagcagctggacatttcccagaactctgttagctacgatgagaaaaagggggactgctcctggaccaaatctctgcttagcctcaatatgtccagcaacatcctgacagataccatttttcggtgtctgccccctcgcatcaaggtgctcgacctgcactctaataagatcaaatccattcccaagcaagtcgtgaaacttgaagccctgcaggagctcaacgttgctttcaatagcctgacggatctgcctggatgcggctctttttccagcctttctgtgctcatcattgaccataacagcgtctcccaccccagcgccgatttcttccagtcttgtcagaagatgagatccatcaaagcgggggacaacccgtttcaatgcacatgtgagctgggagagttcgtgaagaatattgatcaggtcagctccgaagtgctggaaggctggcctgactcttataagtgcgactaccccgagagctatcgggggaccctcctgaaagattttcatatgtccgaactttcttgcaacatcaccctgctcatcgttacaattgtggccaccatgctggtcctggctgtgacagttacgagcctttgtatctacctcgacctgccttggtatctgcgcatggtgtgccagtggacccagacaagacggcgcgccagaaatattcccctcgaggagctgcaacggaaccttcagttccacgcttttatctcctactctggacacgatagcttctgggtcaagaatgaactgctccccaacctggagaaagaaggcatgcagatttgtctgcatgagcgcaattttgtgcctggcaagtccatcgtggagaacatcattacctgcatcgaaaagagctataagtctattttcgttctttccccgaattttgtccagagcgagtggtgtcactacgaactgtacttcgcccatcacaacctctttcacgaggggtctaattccctgatcctcattctgcttgaacccatccctcaatatagcatcccctcttcctaccataagctgaaaagcctcatggcgagacggacatatctggagtggcctaaggagaaatccaagagaggactgttctgggccaaccttcgcgctgccattaatatcaaactgaccgaacaggctaagaaatga

SEQ ID NO: 9550 - protein, 786 aa, synthetic construct [sequence omitted]

SEQ ID NO: 9551 - RNA, 2361 nt, synthetic construct
  misc_feature 1..2361: note = TLR1__Homo_sapiens__AAY85643
  source 1..2361: mol_type = other RNA
atgactagcatcttccattttgccattatcttcatgttaatacttcagatcagaatacaattatctgaagaaagtgaatttttagttgataggtcaaaaaacggtctcatccacgttcctaaagacctatcccagaaaacaacaatcttaaatatatcgcaaaattatatgtctgagctttggacttctgacatcttatcactgtcaaaactgaggattttgataatttctcataatagaatccagtatcttgatatcagtgttttcaaattcaaccaggaattggaatacttggatttgtcccacaacaagttggtgaagatttcttgccaccctactgtgaacctcaagcacttggacctgtcatttaatgcatttgatgccctgcctatatgcaaagagtttggcaatatgtctcaactaaaatttctggggttgagcaccacacacttagaaaaatctagtgtgctgccaattgctcatttgaatatcagcaaggtcttgctggtcttaggagagacttatggggaaaaagaagaccctgagggccttcaagactttaacactgagagtctgcacattgtgttccccacaaacaaagaattccattttattttggatgtgtcagtcaagactgtagcaaatctggaactatctaatatcaaatgtgtgctagaagataacaaatgttcttacttcctaagtattctggcgaaacttcaaacaaatccaaagttatcaagtcttaccttaaacaacattgaaacaacttggaattctttcattaggatcctccagctggtttggcatacaactgtatggtatttctcaatttcaaacgtgaagctacagggtcagctggacttcagagattttgattattctggcacttccttgaaggccttgtctatacaccaagttgtcagcgatgtgttcggttttccgcaaagttatatctatgaaatcttttcgaatatgaacatcaaaaatttcacagtgtctggtacacgcatggtccacatgctttgcccatccaaaattagcccgttcctgcatttggatttttccaataatctcttaacagacacggtttttgaaaattgtgggcaccttactgagttggagacacttattttacaaatgaatcaattaaaagaactttcaaaaatagctgaaatgactacacagatgaagtctctgcaacaattggatattagccagaattctgtaagctatgatgaaaagaaaggagactgttcttggactaaaagtttattaagtttaaatatgtcttcaaatatacttactgacactattttcagatgtttacctcccaggatcaaggtacttgatcttcacagcaataaaataaagagcattcctaaacaagtcgtaaaactggaagctttgcaagaactcaatgttgctttcaattctttaactgaccttcctggatgtggcagctttagcagcctttctgtattgatcattgatcacaattcagtttcccacccatcagctgatttcttccagagctgccagaagatgaggtcaataaaagcaggggacaatccattccaatgtacctgtgagctaggagaatttgtcaaaaatatagaccaagtatcaagtgaagtgttagagggctggcctgattcttataagtgtgactacccggaaagttatagaggaaccctactaaaggactttcacatgtctgaattatcctgcaacataactctgctgatcgtcaccatcgttgccaccatgctggtgttggctgtgactgtgacctccctctgcatctacttggatctgccctggtatctcaggatggtgtgccagtggacccagacccggcgcagggccaggaacatacccttagaagaactccaaagaaatctccagtttcatgcatttatttcatatagtgggcacgattctttctgggtgaagaatgaattattgccaaacctagagaaagaaggtatgcagatttgccttcatgagagaaactttgttcctggcaagagcattgtggaaaatatcatcacctgcattgagaagagttacaagtccatctttgttttgtctcccaactttgtccagagtgaatggtgccattatgaactctactttgcccatcacaatctctttcatgaaggatctaatagcttaatcctgatcttgctggaacccattccgcagtactccattcctagcagttatcacaagctcaaaagtctcatggccaggaggacttatttggaatggcccaaggaaaagagcaaacgtggccttttttgggctaacttaagggcagccattaatattaagctgacagagcaagcaaagaaatag

SEQ ID NO: 9552 - RNA, 2361 nt, synthetic construct
  misc_feature 1..2361: note = derived and/or modified sequence opt1 fromTLR1__Homo_sapiens__AAY85643
  source 1..2361: mol_type = other RNA
atgaccagcatcttccacttcgccatcatcttcatgctgatcctccagatccgcatccagctgtccgaggagagcgagttcctggtggaccggtccaagaacggcctcatccacgtccccaaggacctgagccagaagaccacgatcctgaacatctcccagaactacatgagcgagctctggacctccgacatcctgagcctgtccaagctccgcatcctgatcatcagccacaaccggatccagtacctggacatctccgtgttcaagttcaaccaggagctcgagtacctggacctgagccacaacaagctcgtgaagatctcctgccacccgaccgtcaacctgaagcacctggacctcagcttcaacgccttcgacgcgctgcccatctgcaaggagttcgggaacatgtcccagctgaagttcctcggcctgagcaccacgcacctggagaagtccagcgtgctccccatcgcccacctgaacatctccaaggtgctgctcgtcctgggggagacctacggcgagaaggaggaccccgaggggctgcaggacttcaacaccgagagcctccacatcgtgttcccgaccaacaaggagttccacttcatcctggacgtgagcgtcaagacggtggccaacctggagctctccaacatcaagtgcgtgctggaggacaacaagtgcagctacttcctgtccatcctcgccaagctgcagaccaaccccaagctgagctccctcaccctgaacaacatcgagaccacgtggaacagcttcatccgcatcctgcagctcgtctggcacaccaccgtgtggtacttctccatcagcaacgtgaagctgcagggccagctggacttccgggacttcgactactccggcaccagcctcaaggccctgtccatccaccaggtcgtgagcgacgtgttcgggttcccccagtcctacatctacgagatcttcagcaacatgaacatcaagaacttcacggtctccggcacccgcatggtgcacatgctgtgccccagcaagatctccccgttcctccacctggacttcagcaacaacctgctgaccgacaccgtgttcgagaactgcgggcacctcacggagctggagaccctgatcctccagatgaaccagctgaaggagctgtccaagatcgcggagatgaccacccagatgaagtccctccagcagctggacatcagccagaacagcgtcagctacgacgagaagaagggcgactgctcctggaccaagagcctgctctccctgaacatgagctccaacatcctgaccgacaccatcttccggtgcctcccgccccgcatcaaggtgctggacctgcacagcaacaagatcaagtccatccccaagcaggtcgtgaagctcgaggccctgcaggagctgaacgtggccttcaacagcctcaccgacctgcccgggtgcggctccttcagctccctgagcgtcctcatcatcgaccacaactccgtgagccacccctccgccgacttcttccagagctgccagaagatgcggagcatcaaggcgggcgacaaccccttccagtgcacgtgcgagctgggggagttcgtgaagaacatcgaccaggtctccagcgaggtgctggagggctggcccgactcctacaagtgcgactacccggagagctaccgcgggaccctcctgaaggacttccacatgtccgagctgagctgcaacatcaccctcctgatcgtgaccatcgtcgccacgatgctggtgctcgccgtgaccgtcacctccctgtgcatctacctggacctcccctggtacctgcggatggtgtgccagtggacccagacgcgccggcgcgcccggaacatccccctggaggagctccagcgcaacctgcagttccacgccttcatcagctactccggccacgacagcttctgggtgaagaacgagctgctccccaacctggagaaggagggcatgcagatctgcctgcacgagcggaacttcgtcccggggaagtccatcgtggagaacatcatcacgtgcatcgagaagtcctacaagagcatcttcgtgctcagccccaacttcgtccagtccgagtggtgccactacgagctgtacttcgcgcaccacaacctgttccacgagggcagcaactccctcatcctgatcctgctcgagcccatcccccagtacagcatcccgtccagctaccacaagctcaagagcctgatggcccgccggacctacctggagtggcccaaggagaagtccaagcgcgggctgttctgggccaacctgcgggccgccatcaacatcaagctcaccgagcaggcgaagaagtga

SEQ ID NO: 9553 - RNA, 2361 nt, synthetic construct
  misc_feature 1..2361: note = derived and/or modified sequence opt2 fromTLR1__Homo_sapiens__AAY85643
  source 1..2361: mol_type = other RNA
atgacctccatcttccacttcgccatcatcttcatgctcatcctccagatccgcatccagctctccgaggagtccgagttcctcgtcgaccgctccaagaacggcctcatccacgtccccaaggacctctcccagaagaccaccatcctcaacatctcccagaactacatgtccgagctctggacctccgacatcctctccctctccaagctccgcatcctcatcatctcccacaaccgcatccagtacctcgacatctccgtcttcaagttcaaccaggagctcgagtacctcgacctctcccacaacaagctcgtcaagatctcctgccaccccaccgtcaacctcaagcacctcgacctctccttcaacgccttcgacgccctccccatctgcaaggagttcggcaacatgtcccagctcaagttcctcggcctctccaccacccacctcgagaagtcctccgtcctccccatcgcccacctcaacatctccaaggtcctcctcgtcctcggcgagacctacggcgagaaggaggaccccgagggcctccaggacttcaacaccgagtccctccacatcgtcttccccaccaacaaggagttccacttcatcctcgacgtctccgtcaagaccgtcgccaacctcgagctctccaacatcaagtgcgtcctcgaggacaacaagtgctcctacttcctctccatcctcgccaagctccagaccaaccccaagctctcctccctcaccctcaacaacatcgagaccacctggaactccttcatccgcatcctccagctcgtctggcacaccaccgtctggtacttctccatctccaacgtcaagctccagggccagctcgacttccgcgacttcgactactccggcacctccctcaaggccctctccatccaccaggtcgtctccgacgtcttcggcttcccccagtcctacatctacgagatcttctccaacatgaacatcaagaacttcaccgtctccggcacccgcatggtccacatgctctgcccctccaagatctcccccttcctccacctcgacttctccaacaacctcctcaccgacaccgtcttcgagaactgcggccacctcaccgagctcgagaccctcatcctccagatgaaccagctcaaggagctctccaagatcgccgagatgaccacccagatgaagtccctccagcagctcgacatctcccagaactccgtctcctacgacgagaagaagggcgactgctcctggaccaagtccctcctctccctcaacatgtcctccaacatcctcaccgacaccatcttccgctgcctccccccccgcatcaaggtcctcgacctccactccaacaagatcaagtccatccccaagcaggtcgtcaagctcgaggccctccaggagctcaacgtcgccttcaactccctcaccgacctccccggctgcggctccttctcctccctctccgtcctcatcatcgaccacaactccgtctcccacccctccgccgacttcttccagtcctgccagaagatgcgctccatcaaggccggcgacaaccccttccagtgcacctgcgagctcggcgagttcgtcaagaacatcgaccaggtctcctccgaggtcctcgagggctggcccgactcctacaagtgcgactaccccgagtcctaccgcggcaccctcctcaaggacttccacatgtccgagctctcctgcaacatcaccctcctcatcgtcaccatcgtcgccaccatgctcgtcctcgccgtcaccgtcacctccctctgcatctacctcgacctcccctggtacctccgcatggtctgccagtggacccagacccgccgccgcgcccgcaacatccccctcgaggagctccagcgcaacctccagttccacgccttcatctcctactccggccacgactccttctgggtcaagaacgagctcctccccaacctcgagaaggagggcatgcagatctgcctccacgagcgcaacttcgtccccggcaagtccatcgtcgagaacatcatcacctgcatcgagaagtcctacaagtccatcttcgtcctctcccccaacttcgtccagtccgagtggtgccactacgagctctacttcgcccaccacaacctcttccacgagggctccaactccctcatcctcatcctcctcgagcccatcccccagtactccatcccctcctcctaccacaagctcaagtccctcatggcccgccgcacctacctcgagtggcccaaggagaagtccaagcgcggcctcttctgggccaacctccgcgccgccatcaacatcaagctcaccgagcaggccaagaagtga

SEQ ID NO: 9554 - RNA, 2361 nt, synthetic construct
  misc_feature 1..2361: note = derived and/or modified sequence opt3 fromTLR1__Homo_sapiens__AAY85643
  source 1..2361: mol_type = other RNA
atgaccagcatcttccactttgccattatattcatgctgatcctccagattagaatccaactttccgaggaatctgagtttctggtggacaggtcaaagaacggcttgattcatgtccccaaagatttaagtcagaagacaactatcctgaatataagccagaactacatgtccgaactatggacgtctgacatcctctcgctgtcaaaacttcggattctgatcattagccacaatcgcatccagtatttggatataagtgttttcaagtttaaccaagagctcgaatacctggacctgtcccataataaactcgtgaagatttcttgccaccctaccgtaaacttaaagcatctggatcttagcttcaatgcttttgacgcattgccaatctgtaaagagttcgggaacatgtcccagctgaagtttctaggactctcaacaactcacctggagaaaagtagcgtgcttccgattgcccacctgaatatctctaaggtcttgctcgtgctgggtgaaacctatggcgagaaagaagatcccgaggggttacaggacttcaacacagagtccctgcatatcgtttttcctaccaataaggagttccactttattctcgatgtgtcagtcaagactgtggcgaaccttgaactgagcaatataaaatgcgtattggaagacaacaagtgtagttacttcctatctatcctggctaaactccagacaaatccaaagctgtccagccttaccctgaacaacattgagacgacttggaatagcttcatccgaatattgcaactcgtttggcataccacagtgtggtatttttctatttccaacgtcaaactgcagggacagttagatttccgtgactttgattactcaggcacttcactgaaggccctaagcatccaccaggtggtgtccgacgtcttcggttttccccaatcttatatctacgaaattttcagcaatatgaacatcaaaaattttaccgtttcagggacaagaatggtgcacatgctctgccctagtaagatttccccattcctgcatcttgactttagcaacaatttgctgaccgatacggtattcgagaactgtggacacctcactgagctggaaacacttatactgcagatgaatcagttgaaggagctctctaaaatcgcagaaatgaccactcaaatgaagtcactgcagcagttagacattagtcagaacagcgtgtcctacgatgagaaaaagggcgactgctcttggacaaaatcgctgctaagcctcaatatgtcctcaaacatcctgaccgatacgatctttaggtgtcttccccctcggattaaggtcttggacctgcatagtaataagataaaatctatcccaaagcaagtggttaaactcgaagccctgcaggagttaaacgtggctttcaatagcctgaccgatcttccgggctgcgggtcctttagtagcttgtctgtcctcattatcgaccacaactccgtgagtcatcccagcgcagatttcttccagtcttgtcagaagatgcgctccattaaagccggagacaacccttttcaatgcacatgtgagctgggtgagttcgtaaagaatatcgatcaggtttcaagtgaagtgctagaaggctggccagacagctataagtgcgactaccccgagtcgtatagagggactctgctcaaagattttcacatgtccgaactgtcttgcaacataacccttttgatcgtcacaattgtggctactatgctggtcttagccgtgaccgttacaagcctctgtatctacctggaccttccttggtatctgaggatggtgtgccagtggacccagactcggcgccgagcgagaaatattccattggaggagctccaaaggaacctgcagttccacgcatttatctcatacagtggacatgattccttctgggtaaagaatgaactactgcccaacctcgagaaagaaggcatgcagatatgtctgcacgagcggaattttgtcccgggtaagtctattgtggagaacatcattacgtgcatcgaaaaatcgtataagtccatattcgttctttcacctaattttgtgcagagcgagtggtgtcattacgaattgtacttcgcccaccacaacctgtttcatgaggggagtaattctttaatcctcattctgcttgaacccatcccacaatattccattcctagctcgtaccacaagctgaaatcactaatggctcgtcgcacatatctcgagtggcccaaggagaaatctaagagaggactgttctgggccaacttgagggcagctatcaatataaaactgaccgaacaggccaagaaatga

SEQ ID NO: 9555 - RNA, 2361 nt, synthetic construct
  misc_feature 1..2361: note = derived and/or modified sequence opt4 fromTLR1__Homo_sapiens__AAY85643
  source 1..2361: mol_type = other RNA
atgaccagcatcttccacttcgccatcatcttcatgctgatcctgcagatcagaatccagctgagcgaggagagcgagttcctggtggacagaagcaagaacggcctgatccacgtgcccaaggacctgagccagaagaccaccatcctgaacatcagccagaactacatgagcgagctgtggaccagcgacatcctgagcctgagcaagctgagaatcctgatcatcagccacaacagaatccagtacctggacatcagcgtgttcaagttcaaccaggagctggagtacctggacctgagccacaacaagctggtgaagatcagctgccaccccaccgtgaacctgaagcacctggacctgagcttcaacgccttcgacgccctgcccatctgcaaggagttcggcaacatgagccagctgaagttcctgggcctgagcaccacccacctggagaagagcagcgtgctgcccatcgcccacctgaacatcagcaaggtgctgctggtgctgggcgagacctacggcgagaaggaggaccccgagggcctgcaggacttcaacaccgagagcctgcacatcgtgttccccaccaacaaggagttccacttcatcctggacgtgagcgtgaagaccgtggccaacctggagctgagcaacatcaagtgcgtgctggaggacaacaagtgcagctacttcctgagcatcctggccaagctgcagaccaaccccaagctgagcagcctgaccctgaacaacatcgagaccacctggaacagcttcatcagaatcctgcagctggtgtggcacaccaccgtgtggtacttcagcatcagcaacgtgaagctgcagggccagctggacttcagagacttcgactacagcggcaccagcctgaaggccctgagcatccaccaggtggtgagcgacgtgttcggcttcccccagagctacatctacgagatcttcagcaacatgaacatcaagaacttcaccgtgagcggcaccagaatggtgcacatgctgtgccccagcaagatcagccccttcctgcacctggacttcagcaacaacctgctgaccgacaccgtgttcgagaactgcggccacctgaccgagctggagaccctgatcctgcagatgaaccagctgaaggagctgagcaagatcgccgagatgaccacccagatgaagagcctgcagcagctggacatcagccagaacagcgtgagctacgacgagaagaagggcgactgcagctggaccaagagcctgctgagcctgaacatgagcagcaacatcctgaccgacaccatcttcagatgcctgccccccagaatcaaggtgctggacctgcacagcaacaagatcaagagcatccccaagcaggtggtgaagctggaggccctgcaggagctgaacgtggccttcaacagcctgaccgacctgcccggctgcggcagcttcagcagcctgagcgtgctgatcatcgaccacaacagcgtgagccaccccagcgccgacttcttccagagctgccagaagatgagaagcatcaaggccggcgacaaccccttccagtgcacctgcgagctgggcgagttcgtgaagaacatcgaccaggtgagcagcgaggtgctggagggctggcccgacagctacaagtgcgactaccccgagagctacagaggcaccctgctgaaggacttccacatgagcgagctgagctgcaacatcaccctgctgatcgtgaccatcgtggccaccatgctggtgctggccgtgaccgtgaccagcctgtgcatctacctggacctgccctggtacctgagaatggtgtgccagtggacccagaccagaagaagagccagaaacatccccctggaggagctgcagagaaacctgcagttccacgccttcatcagctacagcggccacgacagcttctgggtgaagaacgagctgctgcccaacctggagaaggagggcatgcagatctgcctgcacgagagaaacttcgtgcccggcaagagcatcgtggagaacatcatcacctgcatcgagaagagctacaagagcatcttcgtgctgagccccaacttcgtgcagagcgagtggtgccactacgagctgtacttcgcccaccacaacctgttccacgagggcagcaacagcctgatcctgatcctgctggagcccatcccccagtacagcatccccagcagctaccacaagctgaagagcctgatggccagaagaacctacctggagtggcccaaggagaagagcaagagaggcctgttctgggccaacctgagagccgccatcaacatcaagctgaccgagcaggccaagaagtga

SEQ ID NO: 9556 - RNA, 2361 nt, synthetic construct
  misc_feature 1..2361: note = derived and/or modified sequence opt5 fromTLR1__Homo_sapiens__AAY85643
  source 1..2361: mol_type = other RNA
atgaccagcatcttccactttgccattatcttcatgctgattctccagatcagaatccaactgtccgaggaatctgagtttcttgtggaccggagcaagaacggcctgatccatgtccccaaagatctctcccagaagacaacgatcctgaatatttctcagaactacatgagcgaactttggacctccgacatcctgtctctcagcaaactgcgcattctgatcatttcccacaatagaatccagtatctcgatattagcgttttcaagtttaaccaagagctggaataccttgacctgtctcataataaactcgtgaagatctcctgccaccctacagtgaacctgaagcatcttgatctgagcttcaatgcttttgacgccctcccgatctgtaaagagttcgggaacatgtctcagctgaagtttctgggactctccaccacacacctggagaaaagctctgtccttcccattgcgcacctgaatatctccaaggtgctcctggttcttggcgaaacctatggggagaaagaagatcctgagggactgcaggacttcaacacagagagcctccatattgtgtttcccaccaataaggagttccactttatcctggatgtctccgtgaagacggttgctaacctggaactctctaatattaaatgcgtgctggaagacaacaagtgtagctacttcctttccatcctggccaaactccagaccaatcctaagctgagctctcttacactgaacaacatcgagaccacatggaatagcttcattcggatcctccaactggtctggcataccacggtgtggtattttagcatttctaacgtgaaactgcagggccagctcgatttccgcgactttgattacagcgggacatccctgaaggccctttctatccaccaggtcgttagcgacgtgttcggatttccccaatcctatatttacgaaatcttcagcaatatgaacatcaaaaattttaccgtgtctggcacaagaatggtccacatgctgtgcccttccaagattagcccgttcctccatctggacttttctaacaatctgcttaccgataccgtgttcgagaactgtggccacctcacagagctggaaacgctgatcctccagatgaatcagctgaaggagctttccaaaattgctgaaatgaccacacaaatgaagtccctgcagcagctcgacatctcccagaactctgttagctacgatgagaaaaagggggactgctcctggaccaaatctctgctgagccttaatatgtccagcaacattctcacagataccatctttcggtgtctgccccctcgcattaaggtgctggacctccattctaataagatcaaatccatccccaagcaagtcgtgaaactggaagcccttcaggagctgaacgttgctttcaatagcctcacggatctgcctggatgcggctctttttccagcctgtctgtgcttattatcgaccacaacagcgtctcccatcccagcgccgatttcttccagtcttgtcagaagatgagatccattaaagcgggggacaacccgtttcaatgcacatgtgagctcggagagttcgtgaagaatatcgatcaggtcagctccgaagtgctggaaggctggcctgactcttataagtgcgactaccccgagagctatcgggggaccctgctcaaagattttcacatgtccgaactgtcttgcaacattacccttctgatcgttacaatcgtggccaccatgctcgtcctggctgtgacagttacgagcctgtgtatttaccttgacctcccttggtatctgcgcatggtgtgccagtggacccagacaagacggcgcgccagaaatatccccctggaggagctccaacggaacctgcagttccacgcttttatttcctactctggacatgatagcttctgggtcaagaatgaacttctgcccaacctcgagaaagaaggcatgcagatctgtctgcacgagcgcaattttgtgcctggcaagtccattgtggagaacatcattacctgcattgaaaagagctataagtctatcttcgttctgtccccgaattttgtccagagcgagtggtgtcattacgaactttacttcgcccaccacaacctgtttcatgaggggtctaattccctcattctgatcctcctggaacccattcctcaatatagcatcccctcttcctaccacaaacttaaaagcctgatggcgagacggacatatctcgagtggcctaaggagaaatccaagagaggactgttctgggccaacctgcgcgctgccatcaatattaaacttaccgaacaggctaagaaatga

SEQ ID NO: 9557 - protein, 786 aa, synthetic construct
  REGION 1..786: note = TLR1__Homo_sapiens__Q15399
MTSIFHFAIIFMLILQIRIQLSEESEFLVDRSKNGLIHVPKDLSQKTTILNISQNYISELWTSDILSLSKLRILIISHNRIQYLDISVFKFNQELEYLDLSHNKLVKISCHPTVNLKHLDLSFNAFDALPICKEFGNMSQLKFLGLSTTHLEKSSVLPIAHLNISKVLLVLGETYGEKEDPEGLQDFNTESLHIVFPTNKEFHFILDVSVKTVANLELSNIKCVLEDNKCSYFLSILAKLQTNPKLSNLTLNNIETTWNSFIRILQLVWHTTVWYFSISNVKLQGQLDFRDFDYSGTSLKALSIHQVVSDVFGFPQSYIYEIFSNMNIKNFTVSGTRMVHMLCPSKISPFLHLDFSNNLLTDTVFENCGHLTELETLILQMNQLKELSKIAEMTTQMKSLQQLDISQNSVSYDEKKGDCSWTKSLLSLNMSSNILTDTIFRCLPPRIKVLDLHSNKIKSIPKQVVKLEALQELNVAFNSLTDLPGCGSFSSLSVLIIDHNSVSHPSADFFQSCQKMRSIKAGDNPFQCTCELGEFVKNIDQVSSEVLEGWPDSYKCDYPESYRGTLLKDFHMSELSCNITLLIVTIVATMLVLAVTVTSLCSYLDLPWYLRMVCQWTQTRRRARNIPLEELQRNLQFHAFISYSGHDSFWVKNELLPNLEKEGMQICLHERNFVPGKSIVENIITCIEKSYKSIFVLSPNFVQSEWCHYELYFAHHNLFHEGSNSLILILLEPIPQYSIPSSYHKLKSLMARRTYLEWPKEKSKRGLFWANLRAAINIKLTEQAKK

SEQ ID NO: 9558 - RNA, 2361 nt, synthetic construct
  misc_feature 1..2361: note = TLR1__Homo_sapiens__AAI09094
  source 1..2361: mol_type = other RNA
atgactagcatcttccattttgccattatcttcatgttaatacttcagatcagaatacaattatctgaagaaagtgaatttttagttgataggtcaaaaaacggtctcatccacgttcctaaagacctatcccagaaaacaacaatcttaaatatatcgcaaaattatatatctgagctttggacttctgacatcttatcactgtcaaaactgaggattttgataatttctcataatagaatccagtatcttgatatcagtgttttcaaattcaaccaggaattggaatacttggatttgtcccacaacaagttggtgaagatttcttgccaccctactgtgaacctcaagcacttggacctgtcatttaatgcatttgatgccctgcctatatgcaaagagtttggcaatatgtctcaactaaaatttctggggttgagcaccacacacttagaaaaatctagtgtgctgccaattgctcatttgaatatcagcaaggtcttgctggtcttaggagagacttatggggaaaaagaagaccctgagggccttcaagactttaacactgagagtctgcacattgtgttccccacaaacaaagaattccattttattttggatgtgtcagtcaagactgtagcaaatctggaactatctaatatcaaatgtgtgctagaagataacaaatgttcttacttcctaagtattctggcgaaacttcaaacaaatccaaagttatcaaatcttaccttaaacaacattgaaacaacttggaattctttcattaggatcctccagctggtttggcatacaactgtatggtatttctcaatttcaaacgtgaagctacagggtcagctggacttcagagattttgattattctggcacttccttgaaggccttgtctatacaccaagttgtcagcgatgtgttcggttttccgcaaagttatatctatgaaatcttttcgaatatgaacatcaaaaatttcacagtgtctggtacacgcatggtccacatgctttgcccatccaaaattagcccgttcctgcatttggatttttccaataatctcttaacagacacggtttttgaaaattgtgggcaccttactgagttggagacacttattttacaaatgaatcaattaaaagaactttcaaaaatagctgaaatgactacacagatgaagtctctgcaacaattggatattagccagaattctgtaagctatgatgaaaagaaaggagactgttcttggactaaaagtttattaagtttaaatatgtcttcaaatatacttactgacactattttcagatgtttacctcccaggatcaaggtacttgatcttcacagcaataaaataaagagcattcctaaacaagtcgtaaaactggaagctttgcaagaactcaatgttgctttcaattctttaactgaccttcctggatgtggcagctttagcagcctttctgtattgatcattgatcacaattcagtttcccacccatcggctgatttcttccagagctgccagaagatgaggtcaataaaagcaggggacaatccattccaatgtacctgtgagctaggagaatttgtcaaaaatatagaccaagtatcaagtgaagtgttagagggctggcctgattcttataagtgtgactacccggaaagttatagaggaaccctactaaaggactttcacatgtctgaattatcctgcaacataactctgctgatcgtcaccatcgttgccaccatgctggtgttggctgtgactgtgacctccctctgcagctacttggatctgccctggtatctcaggatggtgtgccagtggacccagacccggcgcagggccaggaacatacccttagaagaactccaaagaaatctccagtttcatgcatttatttcatatagtgggcacgattctttctgggtgaagaatgaattattgccaaacctagagaaagaaggtatgcagatttgccttcatgagagaaactttgttcctggcaagagcattgtggaaaatatcatcacctgcattgagaagagttacaagtccatctttgttttgtctcccaactttgtccagagtgaatggtgccattatgaactctactttgcccatcacaatctctttcatgaaggatctaatagcttaatcctgatcttgctggaacccattccgcagtactccattcctagcagttatcacaagctcaaaagtctcatggccaggaggacttatttggaatggcccaaggaaaagagcaaacgtggccttttttgggctaacttaagggcagccattaatattaagctgacagagcaagcaaagaaatag

SEQ ID NO: 9559 - RNA, 2361 nt, synthetic construct
  misc_feature 1..2361: note = derived and/or modified sequence opt1 fromTLR1__Homo_sapiens__AAI09094
  source 1..2361: mol_type = other RNA
atgaccagcatcttccacttcgccatcatcttcatgctgatcctccagatccgcatccagctgtccgaggagagcgagttcctggtggaccggtccaagaacggcctcatccacgtccccaaggacctgagccagaagaccaccatcctgaacatctcccagaactacatcagcgagctctggacctccgacatcctgagcctgtccaagctccgcatcctgatcatcagccacaaccggatccagtacctggacatctccgtgttcaagttcaaccaggagctcgagtacctggacctgagccacaacaagctcgtgaagatctcctgccacccgaccgtcaacctgaagcacctggacctcagcttcaacgccttcgacgcgctgcccatctgcaaggagttcgggaacatgtcccagctgaagttcctcggcctgagcaccacgcacctggagaagtccagcgtgctccccatcgcccacctgaacatctccaaggtgctgctcgtcctgggggagacctacggcgagaaggaggaccccgaggggctgcaggacttcaacaccgagagcctccacatcgtgttcccgaccaacaaggagttccacttcatcctggacgtgagcgtcaagacggtggccaacctggagctctccaacatcaagtgcgtgctggaggacaacaagtgcagctacttcctgtccatcctcgccaagctgcagaccaaccccaagctgagcaacctcaccctgaacaacatcgagaccacgtggaactccttcatccgcatcctgcagctcgtctggcacaccaccgtgtggtacttcagcatctccaacgtgaagctgcagggccagctggacttccgggacttcgactacagcggcacctccctcaaggccctgagcatccaccaggtcgtgtccgacgtgttcgggttcccccagagctacatctacgagatcttctccaacatgaacatcaagaacttcacggtcagcggcacccgcatggtgcacatgctgtgcccctccaagatcagcccgttcctccacctggacttctccaacaacctgctgaccgacaccgtgttcgagaactgcgggcacctcacggagctggagaccctgatcctccagatgaaccagctgaaggagctgagcaagatcgcggagatgaccacccagatgaagtccctccagcagctggacatcagccagaacagcgtctcctacgacgagaagaagggcgactgcagctggacgaagtccctgctcagcctgaacatgtccagcaacatcctgaccgacaccatcttccggtgcctcccgccccgcatcaaggtgctggacctgcactccaacaagatcaagagcatccccaagcaggtcgtgaagctcgaggccctgcaggagctgaacgtggccttcaactccctcaccgacctgcccgggtgcggcagcttctccagcctgtccgtcctcatcatcgaccacaacagcgtgtcccaccccagcgccgacttcttccagtcctgccagaagatgcggagcatcaaggcgggcgacaaccccttccagtgcacgtgcgagctgggggagttcgtgaagaacatcgaccaggtcagctccgaggtgctggagggctggcccgacagctacaagtgcgactacccggagtcctaccgcgggaccctcctgaaggacttccacatgagcgagctgtcctgcaacatcaccctcctgatcgtgaccatcgtcgccacgatgctggtgctcgccgtgaccgtcaccagcctgtgctcctacctggacctcccctggtacctgcggatggtgtgccagtggacccagacgcgccggcgcgcccggaacatccccctggaggagctccagcgcaacctgcagttccacgccttcatcagctactccggccacgacagcttctgggtgaagaacgagctgctccccaacctggagaaggagggcatgcagatctgcctgcacgagcggaacttcgtcccggggaagtccatcgtggagaacatcatcacgtgcatcgagaagtcctacaagagcatcttcgtgctcagccccaacttcgtccagtccgagtggtgccactacgagctgtacttcgcgcaccacaacctgttccacgagggcagcaactccctcatcctgatcctgctcgagcccatcccccagtacagcatcccgtccagctaccacaagctcaagagcctgatggcccgccggacctacctggagtggcccaaggagaagtccaagcgcgggctgttctgggccaacctgcgggccgccatcaacatcaagctcaccgagcaggcgaagaagtga

SEQ ID NO: 9560 - RNA, 2361 nt, synthetic construct
  misc_feature 1..2361: note = derived and/or modified sequence opt2 fromTLR1__Homo_sapiens__AAI09094
  source 1..2361: mol_type = other RNA
atgacctccatcttccacttcgccatcatcttcatgctcatcctccagatccgcatccagctctccgaggagtccgagttcctcgtcgaccgctccaagaacggcctcatccacgtccccaaggacctctcccagaagaccaccatcctcaacatctcccagaactacatctccgagctctggacctccgacatcctctccctctccaagctccgcatcctcatcatctcccacaaccgcatccagtacctcgacatctccgtcttcaagttcaaccaggagctcgagtacctcgacctctcccacaacaagctcgtcaagatctcctgccaccccaccgtcaacctcaagcacctcgacctctccttcaacgccttcgacgccctccccatctgcaaggagttcggcaacatgtcccagctcaagttcctcggcctctccaccacccacctcgagaagtcctccgtcctccccatcgcccacctcaacatctccaaggtcctcctcgtcctcggcgagacctacggcgagaaggaggaccccgagggcctccaggacttcaacaccgagtccctccacatcgtcttccccaccaacaaggagttccacttcatcctcgacgtctccgtcaagaccgtcgccaacctcgagctctccaacatcaagtgcgtcctcgaggacaacaagtgctcctacttcctctccatcctcgccaagctccagaccaaccccaagctctccaacctcaccctcaacaacatcgagaccacctggaactccttcatccgcatcctccagctcgtctggcacaccaccgtctggtacttctccatctccaacgtcaagctccagggccagctcgacttccgcgacttcgactactccggcacctccctcaaggccctctccatccaccaggtcgtctccgacgtcttcggcttcccccagtcctacatctacgagatcttctccaacatgaacatcaagaacttcaccgtctccggcacccgcatggtccacatgctctgcccctccaagatctcccccttcctccacctcgacttctccaacaacctcctcaccgacaccgtcttcgagaactgcggccacctcaccgagctcgagaccctcatcctccagatgaaccagctcaaggagctctccaagatcgccgagatgaccacccagatgaagtccctccagcagctcgacatctcccagaactccgtctcctacgacgagaagaagggcgactgctcctggaccaagtccctcctctccctcaacatgtcctccaacatcctcaccgacaccatcttccgctgcctccccccccgcatcaaggtcctcgacctccactccaacaagatcaagtccatccccaagcaggtcgtcaagctcgaggccctccaggagctcaacgtcgccttcaactccctcaccgacctccccggctgcggctccttctcctccctctccgtcctcatcatcgaccacaactccgtctcccacccctccgccgacttcttccagtcctgccagaagatgcgctccatcaaggccggcgacaaccccttccagtgcacctgcgagctcggcgagttcgtcaagaacatcgaccaggtctcctccgaggtcctcgagggctggcccgactcctacaagtgcgactaccccgagtcctaccgcggcaccctcctcaaggacttccacatgtccgagctctcctgcaacatcaccctcctcatcgtcaccatcgtcgccaccatgctcgtcctcgccgtcaccgtcacctccctctgctcctacctcgacctcccctggtacctccgcatggtctgccagtggacccagacccgccgccgcgcccgcaacatccccctcgaggagctccagcgcaacctccagttccacgccttcatctcctactccggccacgactccttctgggtcaagaacgagctcctccccaacctcgagaaggagggcatgcagatctgcctccacgagcgcaacttcgtccccggcaagtccatcgtcgagaacatcatcacctgcatcgagaagtcctacaagtccatcttcgtcctctcccccaacttcgtccagtccgagtggtgccactacgagctctacttcgcccaccacaacctcttccacgagggctccaactccctcatcctcatcctcctcgagcccatcccccagtactccatcccctcctcctaccacaagctcaagtccctcatggcccgccgcacctacctcgagtggcccaaggagaagtccaagcgcggcctcttctgggccaacctccgcgccgccatcaacatcaagctcaccgagcaggccaagaagtga

SEQ ID NO: 9561 - RNA, 2361 nt, synthetic construct
  misc_feature 1..2361: note = derived and/or modified sequence opt3 fromTLR1__Homo_sapiens__AAI09094
  source 1..2361: mol_type = other RNA
atgaccagcatcttccactttgccattatattcatgctgatcctccagattagaatccaactttccgaggaatctgagtttctggtggacaggtcaaagaacggcttgattcatgtccccaaagatttaagtcagaagacaactatcctgaatataagccagaactacatctccgaactatggacgtctgacattctctcgctgtcaaaacttcggatcctgattatcagccacaatcgcatacagtatttggatattagtgttttcaagtttaaccaagagctcgaatacctggacctgtcccataataaactcgtgaagatctcttgccaccctaccgtaaacttaaagcatctggatcttagcttcaatgcttttgacgcattgccaatttgtaaagagttcgggaacatgtcccagctgaagtttctaggactctcaacaactcacctggagaaaagtagcgtgcttccgatcgcccacctgaatatctctaaggtcttgctcgtgctgggtgaaacctatggcgagaaagaagatcccgaggggttacaggacttcaacacagagtccctgcatattgtttttcctaccaataaggagttccactttatactcgatgtgtcagtcaagactgtggcgaaccttgaactgagcaatatcaaatgcgtattggaagacaacaagtgtagttacttcctatctattctggctaaactccagacaaatccaaagctgtccaaccttaccctgaacaatatcgagacgacttggaacagcttcatacgaattttgcaactcgtttggcataccacagtgtggtatttttcgatctctaatgtcaaactgcagggacagttagatttccgtgactttgattactccggcacttcactgaaggccctaagtatccaccaggtggtgagcgacgtcttcggttttccccaatcctatatttacgaaatcttctctaacatgaatattaaaaactttaccgttagcgggacaagaatggtgcacatgctctgcccttcaaagataagtccattcctgcatcttgacttttccaataacttgctgaccgatacggtattcgagaattgtggacacctcactgagctggaaacacttatcctgcagatgaaccagttgaaggagctcagcaaaattgcagaaatgaccactcaaatgaagtctctgcagcagttagacatctcacagaatagtgtgagctacgatgagaaaaagggcgactgctcctggacaaaatctctgctatcgctcaacatgagctccaatatcctgaccgatacgatttttaggtgtcttccccctcggataaaggtcttggacctgcattcaaacaagatcaaaagtattccaaagcaagtggttaaactcgaagccctgcaggagttaaatgtggctttcaactctctgaccgatcttccgggctgcgggagcttttcctcattgagcgtcctcatcattgaccacaactctgtgtcccatcccagtgcagatttcttccagagctgtcagaagatgcgctctatcaaagccggagacaatccttttcaatgcacatgtgagctgggtgagttcgtaaagaacatagatcaggtttcctcagaagtgctagaaggctggccagacagttataagtgcgactaccccgagagctatagagggactctgctcaaagattttcacatgtcggaactgtcctgcaatatcacccttttgattgtcacaatcgtggctactatgctggtcttagccgtgaccgttacatctctctgtagctacctggaccttccttggtatctgaggatggtgtgccagtggacccagactcggcgccgagcgagaaacattccattggaggagctccaaaggaatctgcagttccacgcatttatctcatacagtggacatgattccttctgggtaaagaacgaactactgcccaatctcgagaaagaaggcatgcagatatgtctgcacgagcggaactttgtcccgggtaagtctattgtggagaatatcattacgtgcatcgagaaaagctataagtccatattcgttctttcacctaactttgtgcagagcgaatggtgtcattacgaattgtacttcgcccaccacaatctgtttcatgaggggagtaactctttaatcctcattctgcttgaacccatcccacaatattccattcctagctcgtaccacaagctgaaatcactaatggctcgtcgcacatatctcgagtggcccaaggagaaatctaagagaggactgttctgggccaatttgagggcagctatcaacataaaactgaccgaacaggccaagaaatga

SEQ ID NO: 9562 - RNA, 2361 nt, synthetic construct
  misc_feature 1..2361: note = derived and/or modified sequence opt4 fromTLR1__Homo_sapiens__AAI09094
  source 1..2361: mol_type = other RNA
atgaccagcatcttccacttcgccatcatcttcatgctgatcctgcagatcagaatccagctgagcgaggagagcgagttcctggtggacagaagcaagaacggcctgatccacgtgcccaaggacctgagccagaagaccaccatcctgaacatcagccagaactacatcagcgagctgtggaccagcgacatcctgagcctgagcaagctgagaatcctgatcatcagccacaacagaatccagtacctggacatcagcgtgttcaagttcaaccaggagctggagtacctggacctgagccacaacaagctggtgaagatcagctgccaccccaccgtgaacctgaagcacctggacctgagcttcaacgccttcgacgccctgcccatctgcaaggagttcggcaacatgagccagctgaagttcctgggcctgagcaccacccacctggagaagagcagcgtgctgcccatcgcccacctgaacatcagcaaggtgctgctggtgctgggcgagacctacggcgagaaggaggaccccgagggcctgcaggacttcaacaccgagagcctgcacatcgtgttccccaccaacaaggagttccacttcatcctggacgtgagcgtgaagaccgtggccaacctggagctgagcaacatcaagtgcgtgctggaggacaacaagtgcagctacttcctgagcatcctggccaagctgcagaccaaccccaagctgagcaacctgaccctgaacaacatcgagaccacctggaacagcttcatcagaatcctgcagctggtgtggcacaccaccgtgtggtacttcagcatcagcaacgtgaagctgcagggccagctggacttcagagacttcgactacagcggcaccagcctgaaggccctgagcatccaccaggtggtgagcgacgtgttcggcttcccccagagctacatctacgagatcttcagcaacatgaacatcaagaacttcaccgtgagcggcaccagaatggtgcacatgctgtgccccagcaagatcagccccttcctgcacctggacttcagcaacaacctgctgaccgacaccgtgttcgagaactgcggccacctgaccgagctggagaccctgatcctgcagatgaaccagctgaaggagctgagcaagatcgccgagatgaccacccagatgaagagcctgcagcagctggacatcagccagaacagcgtgagctacgacgagaagaagggcgactgcagctggaccaagagcctgctgagcctgaacatgagcagcaacatcctgaccgacaccatcttcagatgcctgccccccagaatcaaggtgctggacctgcacagcaacaagatcaagagcatccccaagcaggtggtgaagctggaggccctgcaggagctgaacgtggccttcaacagcctgaccgacctgcccggctgcggcagcttcagcagcctgagcgtgctgatcatcgaccacaacagcgtgagccaccccagcgccgacttcttccagagctgccagaagatgagaagcatcaaggccggcgacaaccccttccagtgcacctgcgagctgggcgagttcgtgaagaacatcgaccaggtgagcagcgaggtgctggagggctggcccgacagctacaagtgcgactaccccgagagctacagaggcaccctgctgaaggacttccacatgagcgagctgagctgcaacatcaccctgctgatcgtgaccatcgtggccaccatgctggtgctggccgtgaccgtgaccagcctgtgcagctacctggacctgccctggtacctgagaatggtgtgccagtggacccagaccagaagaagagccagaaacatccccctggaggagctgcagagaaacctgcagttccacgccttcatcagctacagcggccacgacagcttctgggtgaagaacgagctgctgcccaacctggagaaggagggcatgcagatctgcctgcacgagagaaacttcgtgcccggcaagagcatcgtggagaacatcatcacctgcatcgagaagagctacaagagcatcttcgtgctgagccccaacttcgtgcagagcgagtggtgccactacgagctgtacttcgcccaccacaacctgttccacgagggcagcaacagcctgatcctgatcctgctggagcccatcccccagtacagcatccccagcagctaccacaagctgaagagcctgatggccagaagaacctacctggagtggcccaaggagaagagcaagagaggcctgttctgggccaacctgagagccgccatcaacatcaagctgaccgagcaggccaagaagtga

SEQ ID NO: 9563 - RNA, 2361 nt, synthetic construct
  misc_feature 1..2361: note = derived and/or modified sequence opt5 fromTLR1__Homo_sapiens__AAI09094
  source 1..2361: mol_type = other RNA
atgaccagcatcttccactttgccattatcttcatgctgattctccagatccggattcaactgtccgaggaatctgagtttcttgtggacagaagcaagaacggcctgatccatgtccccaaagatctctcccagaagacaacgatcctgaatatttctcagaactacatcagcgaactttggacctccgacattctgtctctcagcaaactgcgcatcctgattatctcccacaatagaatccagtatctcgatatcagcgttttcaagtttaaccaagagctggaataccttgacctgtctcataataaactcgtgaagatctcctgccaccctacagtgaacctgaagcatcttgatctgagcttcaatgcttttgacgccctcccgatttgtaaagagttcgggaacatgtctcagctgaagtttctgggactctccaccacacacctggagaaaagctctgtccttcccatcgcgcacctgaatatttccaaggtgctcctggttcttggcgaaacctatggggagaaagaagatcctgagggactgcaggacttcaacacagagagcctccatatcgtgtttcccaccaataaggagttccactttattctggatgtctccgtgaagacggttgctaacctggaactctctaatatcaaatgcgtgctggaagacaacaagtgtagctacttcctttccatcctggccaaactccagaccaatcctaagctgagcaaccttacactgaacaatattgagaccacatggaactctttcatccggattctccaactggtctggcataccacggtgtggtatttttccatcagcaatgtgaaactgcagggccagctcgatttccgcgactttgattactctgggacaagcctgaaggccctttccattcaccaggtcgtttctgacgtgttcggatttccccaaagctatatctacgaaatcttctccaacatgaatattaaaaactttaccgtgagcggcacaagaatggtccacatgctgtgcccttctaagatctccccgttcctccatctggactttagcaataacctgcttaccgataccgtgttcgagaattgtggccacctcacagagctggaaacgctgattctccagatgaaccagctgaaggagctttctaaaatcgctgaaatgaccacacaaatgaagtccctgcagcagctcgacattagccaaaattccgtttcttacgatgagaaaaagggggactgcagctggaccaaatccctgctgtctcttaacatgagctccaatatcctcacagataccatttttcggtgtctgccccctcgcatcaaggtgctggacctccatagcaacaagatcaaatctattcccaagcaggtcgtgaaactggaagcccttcaggagctgaatgttgctttcaactccctcacggatctgcctggatgcggcagcttttcttccctgagcgtgcttatcattgaccacaactctgtcagccatccctccgccgatttcttccagagctgtcagaagatgagatctatcaaagcgggggacaatccgtttcaatgcacatgtgagctcggagagttcgtgaagaacattgatcaggtctccagcgaagtgctggaaggctggcctgactcctataagtgcgactaccccgagtcttatcgggggaccctgctcaaagattttcacatgagcgaactgtcctgcaatatcacccttctgatcgttacaattgtggccaccatgctcgtcctggctgtgacagttacgtctctgtgtagctaccttgacctcccttggtatctgcgcatggtgtgccagtggacccagacaagacggcgcgccagaaacatccccctggaggagctccaacggaatctgcagttccacgcttttatttcctactctggacatgatagcttctgggtcaagaacgaacttctgcccaatctcgagaaagaaggcatgcagatctgtctgcacgagcgcaactttgtgcctggcaagtccattgtggagaatatcattacctgcattgaaaagagctataagtctatcttcgttctgtccccgaactttgtccagagcgagtggtgtcattacgaactttacttcgcccaccacaatctgtttcatgaggggtctaactccctcattctgatcctcctggaacccattcctcaatatagcatcccctcttcctaccacaaacttaaaagcctgatggcgagacggacatatctcgagtggcctaaggagaaatccaagagaggactgttctgggccaatctgcgcgctgccatcaacattaaacttaccgaacaggctaagaaatga

SEQ ID NO: 9564 - protein, 786 aa, synthetic construct [sequence omitted]

SEQ ID NO: 9565 - RNA, 2361 nt, synthetic construct
  misc_feature 1..2361: note = TLR1__Homo_sapiens__AAH89403
  source 1..2361: mol_type = other RNA
atgactagcatcttccattttgccattatcttcatgttaatacttcagatcagaatacaattatctgaagaaagtgaatttttagttgataggtcaaaaaacggtctcatccacgttcctaaagacctatcccagaaaacaacaatcttaaatatatcgcaaaattatatatctgagctttggacttctgacatcttatcactgtcaaaactgaggattttgataatttctcataatagaatccagtatcttgatatcagtgttttcaaattcaaccaggaattggaatacttggatttgtcccacaacaagttggtgaagatttcttgccaccctactgtgaacctcaagcacttggacctgtcatttaatgcatttgatgccctgcctatatgcaaagagtttggcaatatgtctcaactaaaatttctggggttgagcaccacacacttagaaaaatctagtgtgctgccaattgctcatttgaatatcagcaaggtcttgctggtcttaggagagacttatggggaaaaagaagaccctgagggccttcaagactttaacactgagagtctgcacattgtgttccccacaaacaaagaattccattttattttggatgtgtcagtcaagactgtagcaaatctggaactatctaatatcaaatgtgtgctagaagataacaaatgttcttacttcctaagtattctggcgaaacttcaaacaaatccaaagttatcaagtcttaccttaaacaacattgaaacaacttggaattctttcattaggatcctccagctggtttggcatacaactgtatggtatttctcaatttcaaacgtgaagctacagggtcagctggacttcagagattttgattattctggcacttccttgaaggccttgtctatacaccaagttgtcagcgatgtgttcggttttccgcaaagttatatctatgaaatcttttcgaatatgaacatcaaaaatttcacagtgtctggtacacgcatggtccacatgctttgcccatccaaaattagcccgttcctgaatttggatttttccaataatctcttaacagacacggtttttgaaaattgtgggcaccttactgagttggagacacttattttacaaatgaatcaattaaaagaactttcaaaaatagctgaaatgactacacagatgaagtctctgcaacaattggatattagccagaattctgtaagctatgatgaaaagaaaggagactgttcttggactaaaagtttattaagtttaaatatgtcttcaaatatacttactgacactattttcagatgtttacctcccaggatcaaggtacttgatcttcacagcaataaaataaagagcattcctaaacaagtcgtaaaactggaagctttgcaagaactcaatgttgctttcaattctttaactgaccttcctggatgtggcagctttagcagcctttctgtattgatcattgatcacaattcagtttcccacccatcagctgatttcttccagagctgccagaagatgaggtcaataaaagcaggggacaatccattccaatgtacctgtgagctaggagaatttgtcaaaaatatagaccaagtatcaagtgaagtgttagagggctggcctgattcttataagtgtgactacccggaaagttatagaggaaccctactaaaggactttcacatgtctgaattatcctgcaacataactctgctgatcgtcaccatcgttgccaccatgctggtgttggctgtgactgtgacctccctctgcatctacttggatctgccctggtatctcaggatggtgtgccagtggacccagacccggcgcagggccaggaacatacccttagaagaactccaaagaaatctccagtttcatgcatttatttcatatagtgggcacgattctttctgggtgaagaatgaattattgccaaacctagagaaagaaggtatgcagatttgccttcatgagagaaactttgttcctggcaagagcattgtggaaaatatcatcacctgcattgagaagagttacaagtccatctttgttttgtctcccaactttgtccagagtgaatggtgccattatgaactctactttgcccatcacaatctctttcatgaaggatctaatagcttaatcctgatcttgctggaacccattccgcagtactccattcctagcagttatcacaagctcaaaagtctcatggccaggaggacttatttggaatggcccaaggaaaagagcaaacgtggccttttttgggctaacttaagggcagccattaatattaagctgacagagcaagcaaagaaatag

SEQ ID NO: 9566 - RNA, 2361 nt, synthetic construct
  misc_feature 1..2361: note = derived and/or modified sequence opt1 fromTLR1__Homo_sapiens__AAH89403
  source 1..2361: mol_type = other RNA
atgaccagcatcttccacttcgccatcatcttcatgctgatcctccagatccgcatccagctgtccgaggagagcgagttcctggtggaccggtccaagaacggcctcatccacgtccccaaggacctgagccagaagaccacgatcctgaacatctcccagaactacatcagcgagctctggacctccgacatcctgagcctgtccaagctccgcatcctgatcatcagccacaaccggatccagtacctggacatctccgtgttcaagttcaaccaggagctcgagtacctggacctgagccacaacaagctcgtgaagatctcctgccacccgaccgtcaacctgaagcacctggacctcagcttcaacgccttcgacgcgctgcccatctgcaaggagttcgggaacatgtcccagctgaagttcctcggcctgagcaccacgcacctggagaagtccagcgtgctccccatcgcccacctgaacatctccaaggtgctgctcgtcctgggggagacctacggcgagaaggaggaccccgaggggctgcaggacttcaacaccgagagcctccacatcgtgttcccgaccaacaaggagttccacttcatcctggacgtgagcgtcaagacggtggccaacctggagctctccaacatcaagtgcgtgctggaggacaacaagtgcagctacttcctgtccatcctcgccaagctgcagaccaaccccaagctgagctccctcaccctgaacaacatcgagaccacgtggaacagcttcatccgcatcctgcagctcgtctggcacaccaccgtgtggtacttctccatcagcaacgtgaagctgcagggccagctggacttccgggacttcgactactccggcaccagcctcaaggccctgtccatccaccaggtcgtgagcgacgtgttcgggttcccccagtcctacatctacgagatcttcagcaacatgaacatcaagaacttcacggtctccggcacccgcatggtgcacatgctgtgccccagcaagatctccccgttcctcaacctggacttcagcaacaacctgctgaccgacaccgtgttcgagaactgcgggcacctcacggagctggagaccctgatcctccagatgaaccagctgaaggagctgtccaagatcgcggagatgaccacccagatgaagtccctccagcagctggacatcagccagaacagcgtcagctacgacgagaagaagggcgactgctcctggaccaagagcctgctctccctgaacatgagctccaacatcctgaccgacaccatcttccggtgcctcccgccccgcatcaaggtgctggacctgcacagcaacaagatcaagtccatccccaagcaggtcgtgaagctcgaggccctgcaggagctgaacgtggccttcaacagcctcaccgacctgcccgggtgcggctccttcagctccctgagcgtcctcatcatcgaccacaactccgtgagccacccctccgccgacttcttccagagctgccagaagatgcggagcatcaaggcgggcgacaaccccttccagtgcacgtgcgagctgggggagttcgtgaagaacatcgaccaggtctccagcgaggtgctggagggctggcccgactcctacaagtgcgactacccggagagctaccgcgggaccctcctgaaggacttccacatgtccgagctgagctgcaacatcaccctcctgatcgtgaccatcgtcgccacgatgctggtgctcgccgtgaccgtcacctccctgtgcatctacctggacctcccctggtacctgcggatggtgtgccagtggacccagacgcgccggcgcgcccggaacatccccctggaggagctccagcgcaacctgcagttccacgccttcatcagctactccggccacgacagcttctgggtgaagaacgagctgctccccaacctggagaaggagggcatgcagatctgcctgcacgagcggaacttcgtcccggggaagtccatcgtggagaacatcatcacgtgcatcgagaagtcctacaagagcatcttcgtgctcagccccaacttcgtccagtccgagtggtgccactacgagctgtacttcgcgcaccacaacctgttccacgagggcagcaactccctcatcctgatcctgctcgagcccatcccccagtacagcatcccgtccagctaccacaagctcaagagcctgatggcccgccggacctacctggagtggcccaaggagaagtccaagcgcgggctgttctgggccaacctgcgggccgccatcaacatcaagctcaccgagcaggcgaagaagtga

SEQ ID NO: 9567 - RNA, 2361 nt, synthetic construct
  misc_feature 1..2361: note = derived and/or modified sequence opt2 fromTLR1__Homo_sapiens__AAH89403
  source 1..2361: mol_type = other RNA
atgacctccatcttccacttcgccatcatcttcatgctcatcctccagatccgcatccagctctccgaggagtccgagttcctcgtcgaccgctccaagaacggcctcatccacgtccccaaggacctctcccagaagaccaccatcctcaacatctcccagaactacatctccgagctctggacctccgacatcctctccctctccaagctccgcatcctcatcatctcccacaaccgcatccagtacctcgacatctccgtcttcaagttcaaccaggagctcgagtacctcgacctctcccacaacaagctcgtcaagatctcctgccaccccaccgtcaacctcaagcacctcgacctctccttcaacgccttcgacgccctccccatctgcaaggagttcggcaacatgtcccagctcaagttcctcggcctctccaccacccacctcgagaagtcctccgtcctccccatcgcccacctcaacatctccaaggtcctcctcgtcctcggcgagacctacggcgagaaggaggaccccgagggcctccaggacttcaacaccgagtccctccacatcgtcttccccaccaacaaggagttccacttcatcctcgacgtctccgtcaagaccgtcgccaacctcgagctctccaacatcaagtgcgtcctcgaggacaacaagtgctcctacttcctctccatcctcgccaagctccagaccaaccccaagctctcctccctcaccctcaacaacatcgagaccacctggaactccttcatccgcatcctccagctcgtctggcacaccaccgtctggtacttctccatctccaacgtcaagctccagggccagctcgacttccgcgacttcgactactccggcacctccctcaaggccctctccatccaccaggtcgtctccgacgtcttcggcttcccccagtcctacatctacgagatcttctccaacatgaacatcaagaacttcaccgtctccggcacccgcatggtccacatgctctgcccctccaagatctcccccttcctcaacctcgacttctccaacaacctcctcaccgacaccgtcttcgagaactgcggccacctcaccgagctcgagaccctcatcctccagatgaaccagctcaaggagctctccaagatcgccgagatgaccacccagatgaagtccctccagcagctcgacatctcccagaactccgtctcctacgacgagaagaagggcgactgctcctggaccaagtccctcctctccctcaacatgtcctccaacatcctcaccgacaccatcttccgctgcctccccccccgcatcaaggtcctcgacctccactccaacaagatcaagtccatccccaagcaggtcgtcaagctcgaggccctccaggagctcaacgtcgccttcaactccctcaccgacctccccggctgcggctccttctcctccctctccgtcctcatcatcgaccacaactccgtctcccacccctccgccgacttcttccagtcctgccagaagatgcgctccatcaaggccggcgacaaccccttccagtgcacctgcgagctcggcgagttcgtcaagaacatcgaccaggtctcctccgaggtcctcgagggctggcccgactcctacaagtgcgactaccccgagtcctaccgcggcaccctcctcaaggacttccacatgtccgagctctcctgcaacatcaccctcctcatcgtcaccatcgtcgccaccatgctcgtcctcgccgtcaccgtcacctccctctgcatctacctcgacctcccctggtacctccgcatggtctgccagtggacccagacccgccgccgcgcccgcaacatccccctcgaggagctccagcgcaacctccagttccacgccttcatctcctactccggccacgactccttctgggtcaagaacgagctcctccccaacctcgagaaggagggcatgcagatctgcctccacgagcgcaacttcgtccccggcaagtccatcgtcgagaacatcatcacctgcatcgagaagtcctacaagtccatcttcgtcctctcccccaacttcgtccagtccgagtggtgccactacgagctctacttcgcccaccacaacctcttccacgagggctccaactccctcatcctcatcctcctcgagcccatcccccagtactccatcccctcctcctaccacaagctcaagtccctcatggcccgccgcacctacctcgagtggcccaaggagaagtccaagcgcggcctcttctgggccaacctccgcgccgccatcaacatcaagctcaccgagcaggccaagaagtga

SEQ ID NO: 9568 - RNA, 2361 nt, synthetic construct
  misc_feature 1..2361: note = derived and/or modified sequence opt3 fromTLR1__Homo_sapiens__AAH89403
  source 1..2361: mol_type = other RNA
atgaccagcatcttccactttgccattatattcatgctgatcctccagattagaatccaactttccgaggaatctgagtttctggtggacaggtcaaagaacggcttgattcatgtccccaaagatttaagtcagaagacaactatcctgaatataagccagaactacatctccgaactatggacgtctgacattctctcgctgtcaaaacttcggatcctgattatcagccacaatcgcatacagtatttggatattagtgttttcaagtttaaccaagagctcgaatacctggacctgtcccataataaactcgtgaagatctcttgccaccctaccgtaaacttaaagcatctggatcttagcttcaatgcttttgacgcattgccaatttgtaaagagttcgggaacatgtcccagctgaagtttctaggactctcaacaactcacctggagaaaagtagcgtgcttccgatcgcccacctgaatatctctaaggtcttgctcgtgctgggtgaaacctatggcgagaaagaagatcccgaggggttacaggacttcaacacagagtccctgcatattgtttttcctaccaataaggagttccactttatactcgatgtgtcagtcaagactgtggcgaaccttgaactgagcaatatcaaatgcgtattggaagacaacaagtgtagttacttcctatctattctggctaaactccagacaaatccaaagctgtccagccttaccctgaacaacatcgagacgacttggaatagcttcatacgaattttgcaactcgtttggcataccacagtgtggtatttttctatctccaacgtcaaactgcagggacagttagatttccgtgactttgattactcaggcacttcactgaaggccctaagcatccaccaggtggtgtccgacgtcttcggttttccccaatcttatatttacgaaatcttcagcaatatgaacattaaaaattttaccgtttcagggacaagaatggtgcacatgctctgccctagtaagatatccccattcctgaaccttgactttagcaataacttgctgaccgatacggtattcgagaattgtggacatctcactgagctggaaacacttatcctgcagatgaaccagttgaaggagctctctaaaattgcagaaatgaccactcaaatgaagtcactgcagcagttagacatcagtcagaatagcgtgtcctacgatgagaaaaagggcgactgctcttggacaaaatcgctgctaagcctcaacatgtcctcaaatatcctgaccgatacgatttttaggtgtcttccccctcggataaaggtcttggacctgcacagtaacaagatcaaatctattccaaagcaagtggttaaactcgaagccctgcaggagttaaatgtggctttcaacagcctgaccgatcttccgggctgcgggtcctttagtagcttgtctgtcctcatcattgaccataactccgtgagtcaccccagcgcagatttcttccagtcttgtcagaagatgcgctccatcaaagccggagacaatccttttcaatgcacatgtgagctgggtgagttcgtaaagaacatagatcaggtttcaagtgaagtgctagaaggctggccagacagctataagtgcgactaccccgagtcgtatagagggactctgctcaaagattttcatatgtccgaactgtcttgcaatatcacccttttgattgtcacaatcgtggctactatgctggtcttagccgtgaccgttacaagcctctgtatttacctggaccttccttggtatctgaggatggtgtgccagtggacccagactcggcgccgagcgagaaacatcccattggaggagctccaaaggaatctgcagttccacgcatttatatcatacagtggacacgattccttctgggtaaagaacgaactactgcccaatctcgagaaagaaggcatgcagatttgtctgcatgagcggaactttgtcccgggtaagtctatcgtggagaatattatcacgtgcatagaaaaatcgtataagtccatcttcgttctttcacctaactttgtgcagagcgagtggtgtcactacgaattgtacttcgcccatcacaatctgtttcacgaggggagtaactctttaattctcatcctgcttgaacccattccacaatattccatccctagctcgtaccataagctgaaatcactaatggctcgtcgcacatatctcgagtggcccaaggagaaatctaagagaggactgttctgggccaatttgagggcagctataaacattaaactgaccgaacaggccaagaaatga

SEQ ID NO: 9569 - RNA, 2361 nt, synthetic construct
  misc_feature 1..2361: note = derived and/or modified sequence opt4 fromTLR1__Homo_sapiens__AAH89403
  source 1..2361: mol_type = other RNA
atgaccagcatcttccacttcgccatcatcttcatgctgatcctgcagatcagaatccagctgagcgaggagagcgagttcctggtggacagaagcaagaacggcctgatccacgtgcccaaggacctgagccagaagaccaccatcctgaacatcagccagaactacatcagcgagctgtggaccagcgacatcctgagcctgagcaagctgagaatcctgatcatcagccacaacagaatccagtacctggacatcagcgtgttcaagttcaaccaggagctggagtacctggacctgagccacaacaagctggtgaagatcagctgccaccccaccgtgaacctgaagcacctggacctgagcttcaacgccttcgacgccctgcccatctgcaaggagttcggcaacatgagccagctgaagttcctgggcctgagcaccacccacctggagaagagcagcgtgctgcccatcgcccacctgaacatcagcaaggtgctgctggtgctgggcgagacctacggcgagaaggaggaccccgagggcctgcaggacttcaacaccgagagcctgcacatcgtgttccccaccaacaaggagttccacttcatcctggacgtgagcgtgaagaccgtggccaacctggagctgagcaacatcaagtgcgtgctggaggacaacaagtgcagctacttcctgagcatcctggccaagctgcagaccaaccccaagctgagcagcctgaccctgaacaacatcgagaccacctggaacagcttcatcagaatcctgcagctggtgtggcacaccaccgtgtggtacttcagcatcagcaacgtgaagctgcagggccagctggacttcagagacttcgactacagcggcaccagcctgaaggccctgagcatccaccaggtggtgagcgacgtgttcggcttcccccagagctacatctacgagatcttcagcaacatgaacatcaagaacttcaccgtgagcggcaccagaatggtgcacatgctgtgccccagcaagatcagccccttcctgaacctggacttcagcaacaacctgctgaccgacaccgtgttcgagaactgcggccacctgaccgagctggagaccctgatcctgcagatgaaccagctgaaggagctgagcaagatcgccgagatgaccacccagatgaagagcctgcagcagctggacatcagccagaacagcgtgagctacgacgagaagaagggcgactgcagctggaccaagagcctgctgagcctgaacatgagcagcaacatcctgaccgacaccatcttcagatgcctgccccccagaatcaaggtgctggacctgcacagcaacaagatcaagagcatccccaagcaggtggtgaagctggaggccctgcaggagctgaacgtggccttcaacagcctgaccgacctgcccggctgcggcagcttcagcagcctgagcgtgctgatcatcgaccacaacagcgtgagccaccccagcgccgacttcttccagagctgccagaagatgagaagcatcaaggccggcgacaaccccttccagtgcacctgcgagctgggcgagttcgtgaagaacatcgaccaggtgagcagcgaggtgctggagggctggcccgacagctacaagtgcgactaccccgagagctacagaggcaccctgctgaaggacttccacatgagcgagctgagctgcaacatcaccctgctgatcgtgaccatcgtggccaccatgctggtgctggccgtgaccgtgaccagcctgtgcatctacctggacctgccctggtacctgagaatggtgtgccagtggacccagaccagaagaagagccagaaacatccccctggaggagctgcagagaaacctgcagttccacgccttcatcagctacagcggccacgacagcttctgggtgaagaacgagctgctgcccaacctggagaaggagggcatgcagatctgcctgcacgagagaaacttcgtgcccggcaagagcatcgtggagaacatcatcacctgcatcgagaagagctacaagagcatcttcgtgctgagccccaacttcgtgcagagcgagtggtgccactacgagctgtacttcgcccaccacaacctgttccacgagggcagcaacagcctgatcctgatcctgctggagcccatcccccagtacagcatccccagcagctaccacaagctgaagagcctgatggccagaagaacctacctggagtggcccaaggagaagagcaagagaggcctgttctgggccaacctgagagccgccatcaacatcaagctgaccgagcaggccaagaagtga

SEQ ID NO: 9570 - RNA, 2361 nt, synthetic construct
  misc_feature 1..2361: note = derived and/or modified sequence opt5 fromTLR1__Homo_sapiens__AAH89403
  source 1..2361: mol_type = other RNA
atgaccagcatcttccactttgccattatcttcatgctgattctccagatccggattcaactgtccgaggaatctgagtttcttgtggacagaagcaagaacggcctgatccatgtccccaaagatctctcccagaagacaacgatcctgaatatttctcagaactacatcagcgaactttggacctccgacattctgtctctcagcaaactgcgcatcctgattatctcccacaatagaatccagtatctcgatattagcgttttcaagtttaaccaagagctggaataccttgacctgtctcataataaactcgtgaagatctcctgccaccctacagtgaacctgaagcatcttgatctgagcttcaatgcttttgacgccctcccgatttgtaaagagttcgggaacatgtctcagctgaagtttctgggactctccaccacacacctggagaaaagctctgtccttcccatcgcgcacctgaatatttccaaggtgctcctggttcttggcgaaacctatggggagaaagaagatcctgagggactgcaggacttcaacacagagagcctccatatcgtgtttcccaccaataaggagttccactttattctggatgtctccgtgaagacggttgctaacctggaactctctaatatcaaatgcgtgctggaagacaacaagtgtagctacttcctttccatcctggccaaactccagaccaatcctaagctgagctctcttacactgaacaacattgagaccacatggaactccttcatccggattctccaactggtctggcataccacggtgtggtattttagcatctctaatgtgaaactgcagggccagctcgatttccgcgactttgattacagcgggacatccctgaaggccctttctattcaccaggtcgttagcgacgtgttcggatttccccaatcctatatctacgaaatcttcagcaatatgaacattaaaaattttaccgtgtctggcacaagaatggtccacatgctgtgcccttccaagatcagcccgttcctcaacctggacttttctaataacctgcttaccgataccgtgttcgagaattgtggccatctcacagagctggaaacgctgattctccagatgaaccagctgaaggagctttccaaaatcgctgaaatgaccacacaaatgaaaagcctgcagcagctcgacatttcccaaaattctgttagctacgatgagaaaaagggggactgctcctggaccaaatctctgctgagccttaacatgtccagcaatatcctcacagataccatttttcggtgtctgccccctcgcatcaaggtgctggacctccactctaacaagatcaaatccattcccaagcaggtcgtgaaactggaagcccttcaggagctgaatgttgctttcaacagcctcacggatctgcctggatgcggctctttttccagcctgtctgtgcttatcattgaccataacagcgtctcccaccccagcgccgatttcttccagtcttgtcagaagatgagatccatcaaagcgggggacaatccgtttcaatgcacatgtgagctcggagagttcgtgaagaacattgatcaggtcagctccgaagtgctggaaggctggcctgactcttataagtgcgactaccccgagagctatcgggggaccctgctcaaagattttcatatgtccgaactgtcttgcaatatcacccttctgatcgttacaattgtggccaccatgctcgtcctggctgtgacagttacgagcctgtgtatctaccttgacctcccttggtatctgcgcatggtgtgccagtggacccagacaagacggcgcgccagaaacattcccctggaggagctccaacggaatctgcagttccacgcttttatctcctactctggacacgatagcttctgggtcaagaacgaacttctgcccaatctcgagaaagaaggcatgcagatttgtctgcatgagcgcaactttgtgcctggcaagtccatcgtggagaatatcattacctgcatcgaaaagagctataagtctattttcgttctgtccccgaactttgtccagagcgagtggtgtcactacgaactttacttcgcccatcacaatctgtttcacgaggggtctaactccctcatcctgattctcctggaacccatccctcaatatagcatcccctcttcctaccataaacttaagagcctgatggcgagacggacatatctcgagtggcctaaggagaaatccaagagaggactgttctgggccaatctgcgcgctgccattaacatcaaacttaccgaacaggctaagaaatga

SEQ ID NO: 9571 - protein, 786 aa, synthetic construct [sequence omitted]

SEQ ID NO: 9572 - RNA, 2361 nt, synthetic construct
  misc_feature 1..2361: note = TLR1__Homo_sapiens__CAG38593
  source 1..2361: mol_type = other RNA
atgactagcatcttccattttgccattatcttcatgttaatacttcagatcagaatacaattatctgaagaaagtgaatttttagttgataggtcaaaaaacggtctcatccacgttcctaaagacctatcccagaaaacaacaatcttaaatatatcgcaaaattatatatctgagctttggacttctgacatcttatcactgtcaaaactgaggattttgataatttctcataatagaatccagtatcttgatatcagtgttttcaaattcaaccaggaattggaatacttggatttgtcccacaacaagttggtgaagatttcttgccaccctactgtgaacctcaagcacttggacctgtcatttaatgcatttgatgccctgcctatatgcaaagagtttggcaatatgtctcaactaaaatttctggggttgagcaccacacacttagaaaaatctagtgtgctgccaattgctcatttgaatatcagcaaggtcttgctggtcttaggagagacttatggggaaaaagaagaccctgggggccttcaagactttaacactgagagtctgcacattgtgttccccacaaacaaagaattccattttattttggatgtgtcagtcaagactgtagcaaatctggaactatctaatatcaaatgtgtgctagaagatagcaaatgttcttacttcctaagtattctggcgaaacttcaaacaaatccaaagttatcaagtcttaccttaaacaacattgaaacaacttggaattctttcattaggatcctccagctggtttggcatacaactgtatggtattcctcaatttcaaacgtgaagctacagggtcagctggacttcagagattttgattattctggcacttccttgaaggccttgtctatacaccaagttgtcagcgatgtgttcggttttccgcaaagttatatctatgaaatcttttcgaatatgaacatcaaaaatttcacagtgtctggtacacgcatggtccacatgctttgcccatccaaaattagcccgttcctgcatttggatttttccaataatctcttaacagacacggtttttgaaaattgtgggcaccttactgagttggagacacttattttacaaatgaatcaattaaaagaactttcaaaaatagctgaaatgactacacagatgaagtctctgcaacaattggatattagccagaattctgtaagctatgatgaaaagaaaggagactgttcttggactaaaagtttattaagtttaaatatgtcttcaaatatacttactgacactattttcagatgtttacctcccaggatcaaggtacttgatcttcacagcaataaaataaagagcattcctaaacaagtcgtaaaactggaagctttgcaagaactcaatgttgctttcaattctttaactgaccttcctggatgtggcagctttagcagcctttctgtattgatcattgatcacaattcagtttcccacccatcagctgatttcttccagagctgccagaagatgaggtcaataaaagcaggggacaatccattccaatgtacctgtgagctaggagaatttgtcaaaaatatagaccaagtatcaagtgaagtgttagagggctggcctgattcttataagtgtgactacccggaaagttatagaggaaccctactaaaggactttcacatgtctgaattatcctgcaacataactctgctgatcgtcaccatcgttgccaccatgctggtgttggctgtgactgtgacctccctctgcatctacttggatctgccctggtatctcaggatggtgtgccagtggacccagacccggcgcagggccaggaacatacccttagaagaactccaaagaaatctccagtttcatgcatttatttcatatagtgggcacgattctttctggatgaagaatgaattattgccaaacctagagaaagaaggtatgcagatttgccttcatgagagaaactttgttcctggcaagagcattgtggaaaatatcatcacctgcattgagaagagttacaagtccatctttgttttgtctcccaactttgtccagagtgaatggtgccattatgaactctactttgcccatcacaatctctttcatgaaggatctaatagcttaatcctgatcttgctggaacccattccgcagtactccattcctagcagttatcacaagctcaaaagtctcatggccaggaggacttatttggaatggcccaaggaaaagagcaaacgtggccttttttgggctaacttaagggcagccattaatattaagctgacagagcaagcaaagaaatag

SEQ ID NO: 9573 - RNA, 2361 nt, synthetic construct
  misc_feature 1..2361: note = derived and/or modified sequence opt1 fromTLR1__Homo_sapiens__CAG38593
  source 1..2361: mol_type = other RNA
atgaccagcatcttccacttcgccatcatcttcatgctgatcctccagatccgcatccagctgtccgaggagagcgagttcctggtggaccggtccaagaacggcctcatccacgtccccaaggacctgagccagaagaccacgatcctgaacatctcccagaactacatcagcgagctctggacctccgacatcctgagcctgtccaagctccgcatcctgatcatcagccacaaccggatccagtacctggacatctccgtgttcaagttcaaccaggagctcgagtacctggacctgagccacaacaagctcgtgaagatctcctgccacccgaccgtcaacctgaagcacctggacctcagcttcaacgccttcgacgcgctgcccatctgcaaggagttcgggaacatgtcccagctgaagttcctcggcctgagcaccacgcacctggagaagtccagcgtgctccccatcgcccacctgaacatctccaaggtgctgctcgtcctgggggagacctacggcgagaaggaggaccccgggggcctgcaggacttcaacaccgagagcctccacatcgtgttcccgaccaacaaggagttccacttcatcctggacgtgagcgtcaagacggtggccaacctggagctctccaacatcaagtgcgtgctggaggacagcaagtgctcctacttcctgagcatcctcgccaagctgcagaccaaccccaagctgtccagcctcaccctgaacaacatcgagaccacgtggaactccttcatccgcatcctgcagctcgtctggcacaccaccgtgtggtacagctccatcagcaacgtgaagctgcagggccagctggacttccgggacttcgactactccgggaccagcctcaaggccctgtccatccaccaggtcgtgagcgacgtgttcggcttcccccagtcctacatctacgagatcttcagcaacatgaacatcaagaacttcacggtctccgggacccgcatggtgcacatgctgtgccccagcaagatctccccgttcctccacctggacttcagcaacaacctgctgaccgacaccgtgttcgagaactgcggccacctcacggagctggagaccctgatcctccagatgaaccagctgaaggagctgagcaagatcgcggagatgaccacccagatgaagtccctccagcagctggacatcagccagaactccgtcagctacgacgagaagaagggggactgctcctggaccaagagcctgctctccctgaacatgagctccaacatcctgaccgacaccatcttccggtgcctcccgccccgcatcaaggtgctggacctgcacagcaacaagatcaagtccatccccaagcaggtcgtgaagctcgaggccctgcaggagctgaacgtggccttcaacagcctcaccgacctgcccggctgcggctccttcagctccctgagcgtcctcatcatcgaccacaactccgtgagccaccccagcgccgacttcttccagtcctgccagaagatgcggagcatcaaggcgggggacaaccccttccagtgcacgtgcgagctgggcgagttcgtgaagaacatcgaccaggtctccagcgaggtgctggaggggtggcccgactcctacaagtgcgactacccggagagctaccgcggcaccctcctgaaggacttccacatgtccgagctgagctgcaacatcaccctcctgatcgtgaccatcgtcgccacgatgctggtgctcgccgtgaccgtcacctccctgtgcatctacctggacctcccctggtacctgcggatggtgtgccagtggacccagacgcgccggcgcgcccggaacatccccctggaggagctccagcgcaacctgcagttccacgccttcatcagctactccggccacgacagcttctggatgaagaacgagctgctccccaacctggagaaggaggggatgcagatctgcctgcacgagcggaacttcgtgccgggcaagtccatcgtcgagaacatcatcacgtgcatcgagaagtcctacaagagcatcttcgtgctcagccccaacttcgtgcagtccgagtggtgccactacgagctgtacttcgcgcaccacaacctgttccacgaggggagcaactccctcatcctgatcctgctcgagcccatcccccagtacagcatcccgagctcctaccacaagctcaagagcctgatggcccgccggacctacctggagtggcccaaggagaagtccaagcgcggcctgttctgggccaacctgcgggccgccatcaacatcaagctcaccgagcaggcgaagaagtga

SEQ ID NO: 9574 - RNA, 2361 nt, synthetic construct
  misc_feature 1..2361: note = derived and/or modified sequence opt2 fromTLR1__Homo_sapiens__CAG38593
  source 1..2361: mol_type = other RNA
atgacctccatcttccacttcgccatcatcttcatgctcatcctccagatccgcatccagctctccgaggagtccgagttcctcgtcgaccgctccaagaacggcctcatccacgtccccaaggacctctcccagaagaccaccatcctcaacatctcccagaactacatctccgagctctggacctccgacatcctctccctctccaagctccgcatcctcatcatctcccacaaccgcatccagtacctcgacatctccgtcttcaagttcaaccaggagctcgagtacctcgacctctcccacaacaagctcgtcaagatctcctgccaccccaccgtcaacctcaagcacctcgacctctccttcaacgccttcgacgccctccccatctgcaaggagttcggcaacatgtcccagctcaagttcctcggcctctccaccacccacctcgagaagtcctccgtcctccccatcgcccacctcaacatctccaaggtcctcctcgtcctcggcgagacctacggcgagaaggaggaccccggcggcctccaggacttcaacaccgagtccctccacatcgtcttccccaccaacaaggagttccacttcatcctcgacgtctccgtcaagaccgtcgccaacctcgagctctccaacatcaagtgcgtcctcgaggactccaagtgctcctacttcctctccatcctcgccaagctccagaccaaccccaagctctcctccctcaccctcaacaacatcgagaccacctggaactccttcatccgcatcctccagctcgtctggcacaccaccgtctggtactcctccatctccaacgtcaagctccagggccagctcgacttccgcgacttcgactactccggcacctccctcaaggccctctccatccaccaggtcgtctccgacgtcttcggcttcccccagtcctacatctacgagatcttctccaacatgaacatcaagaacttcaccgtctccggcacccgcatggtccacatgctctgcccctccaagatctcccccttcctccacctcgacttctccaacaacctcctcaccgacaccgtcttcgagaactgcggccacctcaccgagctcgagaccctcatcctccagatgaaccagctcaaggagctctccaagatcgccgagatgaccacccagatgaagtccctccagcagctcgacatctcccagaactccgtctcctacgacgagaagaagggcgactgctcctggaccaagtccctcctctccctcaacatgtcctccaacatcctcaccgacaccatcttccgctgcctccccccccgcatcaaggtcctcgacctccactccaacaagatcaagtccatccccaagcaggtcgtcaagctcgaggccctccaggagctcaacgtcgccttcaactccctcaccgacctccccggctgcggctccttctcctccctctccgtcctcatcatcgaccacaactccgtctcccacccctccgccgacttcttccagtcctgccagaagatgcgctccatcaaggccggcgacaaccccttccagtgcacctgcgagctcggcgagttcgtcaagaacatcgaccaggtctcctccgaggtcctcgagggctggcccgactcctacaagtgcgactaccccgagtcctaccgcggcaccctcctcaaggacttccacatgtccgagctctcctgcaacatcaccctcctcatcgtcaccatcgtcgccaccatgctcgtcctcgccgtcaccgtcacctccctctgcatctacctcgacctcccctggtacctccgcatggtctgccagtggacccagacccgccgccgcgcccgcaacatccccctcgaggagctccagcgcaacctccagttccacgccttcatctcctactccggccacgactccttctggatgaagaacgagctcctccccaacctcgagaaggagggcatgcagatctgcctccacgagcgcaacttcgtccccggcaagtccatcgtcgagaacatcatcacctgcatcgagaagtcctacaagtccatcttcgtcctctcccccaacttcgtccagtccgagtggtgccactacgagctctacttcgcccaccacaacctcttccacgagggctccaactccctcatcctcatcctcctcgagcccatcccccagtactccatcccctcctcctaccacaagctcaagtccctcatggcccgccgcacctacctcgagtggcccaaggagaagtccaagcgcggcctcttctgggccaacctccgcgccgccatcaacatcaagctcaccgagcaggccaagaagtga

SEQ ID NO: 9575 - RNA, 2361 nt, synthetic construct
  misc_feature 1..2361: note = derived and/or modified sequence opt3 fromTLR1__Homo_sapiens__CAG38593
  source 1..2361: mol_type = other RNA
atgaccagcatcttccactttgccattatattcatgctgatcctccagattagaatccaactttccgaggaatctgagtttctggtggacaggtcaaagaacggcttgattcatgtccccaaagatttaagtcagaagacaactatcctgaatataagccagaactacatctccgaactatggacgtctgacattctctcgctgtcaaaacttcggatcctgattatcagccacaatcgcatacagtatttggatattagtgttttcaagtttaaccaagagctcgaatacctggacctgtcccataataaactcgtgaagatctcttgccaccctaccgtaaacttaaagcatctggatcttagcttcaatgcttttgacgcattgccaatttgtaaagagttcgggaacatgtcccagctgaagtttctaggactctcaacaactcacctggagaaaagtagcgtgcttccgatcgcccacctgaatatctctaaggtcttgctcgtgctgggtgaaacctatggcgagaaagaagatcccgggggattacaggacttcaacacagagtccctgcatattgtttttcctaccaataaggagttccactttatactcgatgtgtcagtcaagactgtggcgaaccttgaactgagcaatatcaaatgcgtattggaggacagtaagtgttcttacttcctatccattctggctaaactccagacaaacccaaagctgagctcgcttaccctgaataacatcgaaacgacttggaactctttcatacgaattttgcaactcgtttggcataccacagtgtggtattcctcaatcagtaatgtcaaactgcagggccagttagattttcgtgacttcgattacagcggtacttccctgaaggccctatctatccaccaggtggtgagcgacgtctttgggttcccccaatcatatatttacgagatctttagtaacatgaatattaaaaacttcaccgtttccggaacaagaatggtgcacatgctctgccctagcaagatatctccatttctgcatcttgacttctcaaataacttgctgaccgatacggtatttgaaaattgtggccacctcactgagctggagacacttatcctgcagatgaaccagttgaaggaactcagtaaaattgcagagatgaccactcaaatgaaaagcctgcagcagttagacatctcccagaatagcgtgtcgtacgatgaaaagaagggcgactgcagctggacaaaatccctgctatcactcaacatgagttctaatatcctgaccgatacgattttcaggtgtcttccccctcggataaaggtcttggacctgcatagcaacaagatcaaatccattccaaagcaagtggttaaactcgaggccctgcaggaattaaatgtggcttttaactcactgaccgatcttccggggtgcggatctttctcttccttgagtgtcctcatcattgaccacaatagcgtgtctcatccctccgcagactttttccagtcatgtcagaagatgcgcagtatcaaagccggtgataaccctttccaatgcacatgtgagctgggcgagtttgtaaagaacatagatcaggttagctcggaagtgctagaggggtggccagactcctataagtgcgactaccccgaatcttatagaggaactctgctcaaagatttccacatgagcgagctgtcatgcaatatcacccttttgattgtcacaatcgtggctactatgctggtcttagccgtgaccgttacaagtctctgtatttacctggaccttccttggtatctgaggatggtgtgccagtggacccagactcggcgccgagcgagaaacatcccattggaggaactccaaaggaatctgcagtttcacgcattcatatcctactctggccatgatagcttttggatgaagaacgagctactgcccaatctcgaaaaagagggtatgcagatttgtctgcacgaacggaacttcgtaccggggaagtccatcgtcgagaatattatcacgtgcatagagaaatcatataagagcatctttgtgcttagtcctaacttcgttcagtctgaatggtgtcattacgagttgtactttgcccaccacaatctgttccatgaaggatccaacagcttaattctcatcctgcttgagcccattccacaatattcgatcccttcatcttaccacaagctgaaaagtctaatggctcgtcgcacatatctcgaatggcccaaggagaaatccaagagaggcctgttttgggccaatttgagggcagctataaacattaaactgaccgagcaggccaagaaatga

SEQ ID NO: 9576 - RNA, 2361 nt, synthetic construct
  misc_feature 1..2361: note = derived and/or modified sequence opt4 fromTLR1__Homo_sapiens__CAG38593
  source 1..2361: mol_type = other RNA
atgaccagcatcttccacttcgccatcatcttcatgctgatcctgcagatcagaatccagctgagcgaggagagcgagttcctggtggacagaagcaagaacggcctgatccacgtgcccaaggacctgagccagaagaccaccatcctgaacatcagccagaactacatcagcgagctgtggaccagcgacatcctgagcctgagcaagctgagaatcctgatcatcagccacaacagaatccagtacctggacatcagcgtgttcaagttcaaccaggagctggagtacctggacctgagccacaacaagctggtgaagatcagctgccaccccaccgtgaacctgaagcacctggacctgagcttcaacgccttcgacgccctgcccatctgcaaggagttcggcaacatgagccagctgaagttcctgggcctgagcaccacccacctggagaagagcagcgtgctgcccatcgcccacctgaacatcagcaaggtgctgctggtgctgggcgagacctacggcgagaaggaggaccccggcggcctgcaggacttcaacaccgagagcctgcacatcgtgttccccaccaacaaggagttccacttcatcctggacgtgagcgtgaagaccgtggccaacctggagctgagcaacatcaagtgcgtgctggaggacagcaagtgcagctacttcctgagcatcctggccaagctgcagaccaaccccaagctgagcagcctgaccctgaacaacatcgagaccacctggaacagcttcatcagaatcctgcagctggtgtggcacaccaccgtgtggtacagcagcatcagcaacgtgaagctgcagggccagctggacttcagagacttcgactacagcggcaccagcctgaaggccctgagcatccaccaggtggtgagcgacgtgttcggcttcccccagagctacatctacgagatcttcagcaacatgaacatcaagaacttcaccgtgagcggcaccagaatggtgcacatgctgtgccccagcaagatcagccccttcctgcacctggacttcagcaacaacctgctgaccgacaccgtgttcgagaactgcggccacctgaccgagctggagaccctgatcctgcagatgaaccagctgaaggagctgagcaagatcgccgagatgaccacccagatgaagagcctgcagcagctggacatcagccagaacagcgtgagctacgacgagaagaagggcgactgcagctggaccaagagcctgctgagcctgaacatgagcagcaacatcctgaccgacaccatcttcagatgcctgccccccagaatcaaggtgctggacctgcacagcaacaagatcaagagcatccccaagcaggtggtgaagctggaggccctgcaggagctgaacgtggccttcaacagcctgaccgacctgcccggctgcggcagcttcagcagcctgagcgtgctgatcatcgaccacaacagcgtgagccaccccagcgccgacttcttccagagctgccagaagatgagaagcatcaaggccggcgacaaccccttccagtgcacctgcgagctgggcgagttcgtgaagaacatcgaccaggtgagcagcgaggtgctggagggctggcccgacagctacaagtgcgactaccccgagagctacagaggcaccctgctgaaggacttccacatgagcgagctgagctgcaacatcaccctgctgatcgtgaccatcgtggccaccatgctggtgctggccgtgaccgtgaccagcctgtgcatctacctggacctgccctggtacctgagaatggtgtgccagtggacccagaccagaagaagagccagaaacatccccctggaggagctgcagagaaacctgcagttccacgccttcatcagctacagcggccacgacagcttctggatgaagaacgagctgctgcccaacctggagaaggagggcatgcagatctgcctgcacgagagaaacttcgtgcccggcaagagcatcgtggagaacatcatcacctgcatcgagaagagctacaagagcatcttcgtgctgagccccaacttcgtgcagagcgagtggtgccactacgagctgtacttcgcccaccacaacctgttccacgagggcagcaacagcctgatcctgatcctgctggagcccatcccccagtacagcatccccagcagctaccacaagctgaagagcctgatggccagaagaacctacctggagtggcccaaggagaagagcaagagaggcctgttctgggccaacctgagagccgccatcaacatcaagctgaccgagcaggccaagaagtga

SEQ ID NO: 9577 - RNA, 2361 nt, synthetic construct
  misc_feature 1..2361: note = derived and/or modified sequence opt5 fromTLR1__Homo_sapiens__CAG38593
  source 1..2361: mol_type = other RNA
atgaccagcatcttccactttgccattatcttcatgctgattctccagatccggattcaactgtccgaggaatctgagtttcttgtggacagaagcaagaacggcctgatccatgtccccaaagatctctcccagaagacaacgatcctgaatatttctcagaactacatcagcgaactttggacctccgacattctgtctctcagcaaactgcgcatcctgattatctcccacaatagaatccagtatctcgatattagcgttttcaagtttaaccaagagctggaataccttgacctgtctcataataaactcgtgaagatctcctgccaccctacagtgaacctgaagcatcttgatctgagcttcaatgcttttgacgccctcccgatttgtaaagagttcgggaacatgtctcagctgaagtttctgggactctccaccacacacctggagaaaagctctgtccttcccatcgcgcacctgaatatttccaaggtgctcctggttcttggcgaaacctatggggagaaagaagatcctggaggcctgcaggacttcaacacagagagcctccatatcgtgtttcccaccaataaggagttccactttattctggatgtctccgtgaagacggttgctaacctggaactctctaatatcaaatgcgtgctggaggacagcaagtgttcctacttccttagcatcctggccaaactccagaccaaccctaagctgtcttcccttacactgaataacattgaaaccacatggaacagcttcatccggattctccaactggtctggcataccacggtgtggtattctagcatctccaatgtgaaactgcaggggcagctcgattttcgcgacttcgattactctggaacaagcctgaaggccctttccattcaccaggtcgttagcgacgtgtttggcttcccccaatcttatatctacgagatcttttccaacatgaatattaaaaacttcaccgtgagcggcacaagaatggtccacatgctgtgcccttctaagatctccccgtttctccatctggacttcagcaataacctgcttaccgataccgtgtttgaaaattgtgggcacctcacagagctggagacgctgattctccagatgaaccagctgaaggaactttccaaaatcgctgagatgaccacacaaatgaagtctctgcagcagctcgacattagccaaaattccgtttcttacgatgaaaagaagggagactgcagctggaccaaatccctgctgagccttaacatgtcttccaatatcctcacagataccattttccggtgtctgccccctcgcatcaaggtgctggacctccatagcaacaagatcaaatctattcccaagcaggtcgtgaaactggaggcccttcaggaactgaatgttgcttttaactccctcacggatctgcctggctgcgggagcttctctagcctgtccgtgcttatcattgaccacaatagcgtctctcatccctccgccgactttttccagagctgtcagaagatgagatccatcaaagcgggagataacccgttccaatgcacatgtgagctcggcgagtttgtgaagaacattgatcaggtctctagcgaagtgctggaggggtggcctgactcctataagtgcgactaccccgaatcttatcggggaaccctgctcaaagatttccacatgagcgagctgtcctgcaatatcacccttctgatcgttacaattgtggccaccatgctcgtcctggctgtgacagttacgtctctgtgtatctaccttgacctcccttggtatctgcgcatggtgtgccagtggacccagacaagacggcgcgccagaaacattcccctggaggaactccaacggaatctgcagtttcacgctttcatcagctactccggccatgatagcttttggatgaagaacgagcttctgcccaatctcgaaaaagagggcatgcagatttgtctgcacgaacgcaacttcgtccctgggaagtctatcgtggagaatatcattacctgcatcgagaaatcctataagagcatttttgtgctgtctccgaacttcgttcagtccgaatggtgtcattacgagctttactttgcccaccacaatctgttccatgaaggaagcaactctctcatcctgattctcctggagcccatccctcaatattccatccccagctcctaccacaaacttaaaagcctgatggcgagacggacatatctcgaatggcctaaggagaaatctaagagaggcctgttttgggccaatctgcgcgctgccattaacatcaaacttaccgagcaggctaagaaatga

SEQ ID NO: 9578 - protein, 784 aa, synthetic construct
  REGION 1..784: note = TLR2__Homo_sapiens__O60603
MPHTLWMVWVLGVIISLSKEESSNQASLSCDRNGICKGSSGSLNSIPSGLTEAVKSLDLSNNRITYISNSDLQRCVNLQALVLTSNGINTIEEDSFSSLGSLEHLDLSYNYLSNLSSSWFKPLSSLTFLNLLGNPYKTLGETSLFSHLTKLQILRVGNMDTFTKIQRKDFAGLTFLEELEIDASDLQSYEPKSLKSIQNVSHLILHMKQHILLLEIFVDVTSSVECLELRDTDLDTFHFSELSTGETNSLIKKFTFRNVKITDESLFQVMKLLNQISGLLELEFDDCTLNGVGNFRASDNDRVIDPGKVETLTIRRLHIPRFYLFYDLSTLYSLTERVKRITVENSKVFLVPCLLSQHLKSLEYLDLSENLMVEEYLKNSACEDAWPSLQTLILRQNHLASLEKTGETLLTLKNLTNIDISKNSFHSMPETCQWPEKMKYLNLSSTRIHSVTGCIPKTLEILDVSNNNLNLFSLNLPQLKELYISRNKLMTLPDASLLPMLLVLKISRNAITTFSKEQLDSFHTLKTLEAGGNNFICSCEFLSFTQEQQALAKVLIDWPANYLCDSPSHVRGQQVQDVRLSVSECHRTALVSGMCCALFLLILLTGVLCHRFHGLWYMKMMWAWLQAKRKPRKAPSRNICYDAFVSYSERDAYWVENLMVQELENFNPPFKLCLHKRDFIPGKWIIDNIIDSIEKSHKTVFVLSENFVKSEWCKYELDFSHFRLFDENNDAAILILLEPIEKKAIPQRFCKLRKIMNTKTYLEWPMDEAQREGFWVNLRAAIKS

SEQ ID NO: 9579 - RNA, 2355 nt, synthetic construct
  misc_feature 1..2355: note = TLR2__Homo_sapiens__AAC34377
  source 1..2355: mol_type = other RNA
atgccacatactttgtggatggtgtgggtcctgggggtcatcatcagcctctccaaggaagaatcctccaatcaggcttctctgtcttgtgaccgcaatggtatctgcaagggcagctcaggatctttaaactccattccctcagggctcacagaagctgtaaaaagccttgacctgtccaacaacaggatcacctacattagcaacagtgacctacagaggtgtgtgaacctccaggctctggtgctgacatccaatggaattaacacaatagaggaagattctttttcttccctgggcagtcttgaacatttagacttatcctataattacttatctaatttatcgtcttcctggttcaagcccctttcttctttaacattcttaaacttactgggaaatccttacaaaaccctaggggaaacatctcttttttctcatctcacaaaattgcaaatcctgagagtgggaaatatggacaccttcactaagattcaaagaaaagattttgctggacttaccttccttgaggaacttgagattgatgcttcagatctacagagctatgagccaaaaagtttgaagtcaattcagaatgtaagtcatctgatccttcatatgaagcagcatattttactgctggagatttttgtagatgttacaagttccgtggaatgtttggaactgcgagatactgatttggacactttccatttttcagaactatccactggtgaaacaaattcattgattaaaaagtttacatttagaaatgtgaaaatcaccgatgaaagtttgtttcaggttatgaaacttttgaatcagatttctggattgttagaattagagtttgatgactgtacccttaatggagttggtaattttagagcatctgataatgacagagttatagatccaggtaaagtggaaacgttaacaatccggaggctgcatattccaaggttttacttattttatgatctgagcactttatattcacttacagaaagagttaaaagaatcacagtagaaaacagtaaagtttttctggttccttgtttactttcacaacatttaaaatcattagaatacttggatctcagtgaaaatttgatggttgaagaatacttgaaaaattcagcctgtgaggatgcctggccctctctacaaactttaattttaaggcaaaatcatttggcatcattggaaaaaaccggagagactttgctcactctgaaaaacttgactaacattgatatcagtaagaatagttttcattctatgcctgaaacttgtcagtggccagaaaagatgaaatatttgaacttatccagcacacgaatacacagtgtaacaggctgcattcccaagacactggaaattttagatgttagcaacaacaatctcaatttattttctttgaatttgccgcaactcaaagaactttatatttccagaaataagttgatgactctaccagatgcctccctcttacccatgttactagtattgaaaatcagtaggaatgcaataactacgttttctaaggagcaacttgactcatttcacacactgaagactttggaagctggtggcaataacttcatttgctcctgtgaattcctctccttcactcaggagcagcaagcactggccaaagtcttgattgattggccagcaaattacctgtgtgactctccatcccatgtgcgtggccagcaggttcaggatgtccgcctctcggtgtcggaatgtcacaggacagcactggtgtctggcatgtgctgtgctctgttcctgctgatcctgctcacgggggtcctgtgccaccgtttccatggcctgtggtatatgaaaatgatgtgggcctggctccaggccaaaaggaagcccaggaaagctcccagcaggaacatctgctatgatgcatttgtttcttacagtgagcgggatgcctactgggtggagaaccttatggtccaggagctggagaacttcaatccccccttcaagttgtgtcttcataagcgggacttcattcctggcaagtggatcattgacaatatcattgactccattgaaaagagccacaaaactgtctttgtgctttctgaaaactttgtgaagagtgagtggtgcaagtatgaactggacttctcccatttccgtctttttgatgagaacaatgatgctgccattctcattcttctggagcccattgagaaaaaagccattccccagcgcttctgcaagctgcggaagataatgaacaccaagacctacctggagtggcccatggacgaggctcagcgggaaggattttgggtaaatctgagagctgcgataaagtcctag

SEQ ID NO: 9580 - RNA, 2355 nt, synthetic construct
  misc_feature 1..2355: note = derived and/or modified sequence opt1 fromTLR2__Homo_sapiens__AAC34377
  source 1..2355: mol_type = other RNA
atgccccacaccctgtggatggtgtgggtcctcggcgtgatcatcagcctgtccaaggaggagagctccaaccaggccagcctgtcctgcgaccgcaacgggatctgcaagggcagctccgggagcctcaactccatcccgagcggcctgaccgaggccgtgaagtccctggacctcagcaacaaccggatcacgtacatctccaacagcgacctgcagcgctgcgtcaacctgcaggcgctcgtgctgacctccaacgggatcaacaccatcgaggaggacagcttctccagcctgggctccctcgagcacctggacctgagctacaactacctcagcaacctgtccagctcctggttcaagcccctgagctccctcaccttcctgaacctgctcggcaacccctacaagacgctgggggagaccagcctgttctcccacctcaccaagctgcagatcctgcgggtgggcaacatggacaccttcacgaagatccagcgcaaggacttcgccgggctcaccttcctggaggagctggagatcgacgccagcgacctccagtcctacgagcccaagagcctgaagtccatccagaacgtcagccacctgatcctccacatgaagcagcacatcctgctgctcgagatcttcgtggacgtgacctccagcgtcgagtgcctggagctgcgggacaccgacctcgacacgttccacttctccgagctgagcaccggcgagaccaactccctgatcaagaagttcaccttccgcaacgtgaagatcacggacgagagcctcttccaggtgatgaagctgctgaaccagatctccgggctcctggagctggagttcgacgactgcaccctcaacggcgtcggcaacttccgggccagcgacaacgaccgcgtgatcgacccggggaaggtggagaccctgaccatccggcgcctgcacatcccccggttctacctgttctacgacctcagcacgctgtactccctgaccgagcgcgtcaagcggatcaccgtggagaacagcaaggtgttcctcgtcccctgcctgctgtcccagcacctcaagagcctggagtacctggacctctccgagaacctgatggtggaggagtacctgaagaacagcgcctgcgaggacgcgtggccctccctccagaccctgatcctgcgccagaaccacctcgccagcctggagaagacgggcgagaccctgctcaccctgaagaacctgaccaacatcgacatctccaagaacagcttccactccatgccggagacgtgccagtggcccgagaagatgaagtacctcaacctgagctccacccggatccacagcgtgaccgggtgcatccccaagaccctggagatcctcgacgtctccaacaacaacctgaacctgttcagcctcaacctgccccagctgaaggagctctacatctcccgcaacaagctgatgacgctgccggacgccagcctcctgcccatgctgctcgtgctgaagatcagccggaacgccatcaccaccttctccaaggagcagctggacagcttccacaccctcaagacgctggaggcgggcggcaacaacttcatctgctcctgcgagttcctgagcttcacccaggagcagcaggccctcgccaaggtgctgatcgactggcccgccaactacctgtgcgactcccccagccacgtccgcgggcagcaggtccaggacgtgcggctctccgtgagcgagtgccaccgcaccgccctggtgtccggcatgtgctgcgcgctgttcctcctgatcctgctcaccggggtcctgtgccaccggttccacggcctgtggtacatgaagatgatgtgggcctggctccaggccaagcgcaagccgcgcaaggcccccagccggaacatctgctacgacgccttcgtgtcctacagcgagcgcgacgcgtactgggtggagaacctgatggtccaggagctggagaacttcaacccgcccttcaagctctgcctgcacaagcgggacttcatccccgggaagtggatcatcgacaacatcatcgactccatcgagaagtcccacaagaccgtgttcgtgctgagcgagaacttcgtcaagagcgagtggtgcaagtacgagctcgacttctcccacttccgcctgttcgacgagaacaacgacgccgccatcctgatcctcctggagcccatcgagaagaaggccatcccccagcggttctgcaagctgcgcaagatcatgaacacgaagacctacctcgagtggcccatggacgaggcccagcgggagggcttctgggtgaacctgcgcgcggccatcaagagctga

SEQ ID NO: 9581 - RNA, 2355 nt, synthetic construct
  misc_feature 1..2355: note = derived and/or modified sequence opt2 fromTLR2__Homo_sapiens__AAC34377
  source 1..2355: mol_type = other RNA
atgccccacaccctctggatggtctgggtcctcggcgtcatcatctccctctccaaggaggagtcctccaaccaggcctccctctcctgcgaccgcaacggcatctgcaagggctcctccggctccctcaactccatcccctccggcctcaccgaggccgtcaagtccctcgacctctccaacaaccgcatcacctacatctccaactccgacctccagcgctgcgtcaacctccaggccctcgtcctcacctccaacggcatcaacaccatcgaggaggactccttctcctccctcggctccctcgagcacctcgacctctcctacaactacctctccaacctctcctcctcctggttcaagcccctctcctccctcaccttcctcaacctcctcggcaacccctacaagaccctcggcgagacctccctcttctcccacctcaccaagctccagatcctccgcgtcggcaacatggacaccttcaccaagatccagcgcaaggacttcgccggcctcaccttcctcgaggagctcgagatcgacgcctccgacctccagtcctacgagcccaagtccctcaagtccatccagaacgtctcccacctcatcctccacatgaagcagcacatcctcctcctcgagatcttcgtcgacgtcacctcctccgtcgagtgcctcgagctccgcgacaccgacctcgacaccttccacttctccgagctctccaccggcgagaccaactccctcatcaagaagttcaccttccgcaacgtcaagatcaccgacgagtccctcttccaggtcatgaagctcctcaaccagatctccggcctcctcgagctcgagttcgacgactgcaccctcaacggcgtcggcaacttccgcgcctccgacaacgaccgcgtcatcgaccccggcaaggtcgagaccctcaccatccgccgcctccacatcccccgcttctacctcttctacgacctctccaccctctactccctcaccgagcgcgtcaagcgcatcaccgtcgagaactccaaggtcttcctcgtcccctgcctcctctcccagcacctcaagtccctcgagtacctcgacctctccgagaacctcatggtcgaggagtacctcaagaactccgcctgcgaggacgcctggccctccctccagaccctcatcctccgccagaaccacctcgcctccctcgagaagaccggcgagaccctcctcaccctcaagaacctcaccaacatcgacatctccaagaactccttccactccatgcccgagacctgccagtggcccgagaagatgaagtacctcaacctctcctccacccgcatccactccgtcaccggctgcatccccaagaccctcgagatcctcgacgtctccaacaacaacctcaacctcttctccctcaacctcccccagctcaaggagctctacatctcccgcaacaagctcatgaccctccccgacgcctccctcctccccatgctcctcgtcctcaagatctcccgcaacgccatcaccaccttctccaaggagcagctcgactccttccacaccctcaagaccctcgaggccggcggcaacaacttcatctgctcctgcgagttcctctccttcacccaggagcagcaggccctcgccaaggtcctcatcgactggcccgccaactacctctgcgactccccctcccacgtccgcggccagcaggtccaggacgtccgcctctccgtctccgagtgccaccgcaccgccctcgtctccggcatgtgctgcgccctcttcctcctcatcctcctcaccggcgtcctctgccaccgcttccacggcctctggtacatgaagatgatgtgggcctggctccaggccaagcgcaagccccgcaaggccccctcccgcaacatctgctacgacgccttcgtctcctactccgagcgcgacgcctactgggtcgagaacctcatggtccaggagctcgagaacttcaacccccccttcaagctctgcctccacaagcgcgacttcatccccggcaagtggatcatcgacaacatcatcgactccatcgagaagtcccacaagaccgtcttcgtcctctccgagaacttcgtcaagtccgagtggtgcaagtacgagctcgacttctcccacttccgcctcttcgacgagaacaacgacgccgccatcctcatcctcctcgagcccatcgagaagaaggccatcccccagcgcttctgcaagctccgcaagatcatgaacaccaagacctacctcgagtggcccatggacgaggcccagcgcgagggcttctgggtcaacctccgcgccgccatcaagtcctga

SEQ ID NO: 9582 - RNA, 2355 nt, synthetic construct
  misc_feature 1..2355: note = derived and/or modified sequence opt3 fromTLR2__Homo_sapiens__AAC34377
  source 1..2355: mol_type = other RNA
atgccccacaccctgtggatggtgtgggtcctcggcgttatcattagcctttccaaggaggaatcttcaaaccaggccagtctgagctgcgacagaaatgggatatgtaaaggatcctctggttcgttgaactcaatccctagcggcttaacagaggctgtgaagagtctggatctatccaataacaggattacttacatctctaatagcgacctccaacggtgcgtaaacctgcaggcacttgtgctgacgtccaatgggattaacaccatcgaagaggattcattcagtagcttgggatctctcgaacatctggacctgtcctataattacctctcaaacttaagcagttcttggtttaaaccactgtccagccttacattcttgaatctgctaggcaacccgtataagactctcggtgagacctcgctgttttctcaccttacaaaactgcagatattgcgcgtcgggaatatggataccttcactaagatccagcgaaaggactttgccggactcacattcctggaggaattagagattgatgcgtccgacctgcaatcatacgaacccaaaagtctcaagagcatccagaacgtgtcccatcttattctgcacatgaaacagcatatcttgctactggagatatttgttgatgtgacctctagcgtcgagtgtctcgaactgcgtgacacggatcttgacactttccacttttcagagctgagtaccggcgaaacaaattccttgattaagaaattcacttttagaaacgtgaagatcaccgatgagagcctcttccaggtaatgaagctgttaaaccaaatttctggcctgctagaactcgagtttgacgactgcacactgaatggggttggaaacttcagggcttcagataatgaccgggtgatcgatcctggtaaagtcgagacccttacgatccgcagattgcacattccaaggttctatctgttttacgacctcagtactctgtatagccttacagaacgggtgaagcgcataaccgtggagaactccaaagtcttcctggttccctgtttgctctctcagcatctgaagtcgttagaatacctggatctaagcgagaatctcatggtggaagagtacctgaaaaactccgcctgcgaggacgcatggccttcacttcagactttgatcctgcgacagaatcacctcgccagtctggaaaagacaggcgagaccttactgacgcttaaaaacttgaccaatattgatatctctaagaacagctttcattccatgccagaaacatgtcaatggcccgagaagatgaaatatctcaatctgtcaagcactagaatacactctgtaaccgggtgcattcctaagacactagaaatcctggacgtgtccaacaataacctcaatctgttcagtcttaacttgccacagctgaaagagttatacatcagcaggaacaagctcatgactctgccggatgcttctcttctgcccatgttgctcgtcctgaaaatttcccggaatgcaatcaccacattttcaaaggagcagctagacagtttccacaccctgaagactctcgaagccggaggcaacaattttatttgtagctgcgagttcctgtcgtttacgcaagaacagcaggctcttgccaaagtgttgatagattggcctgcgaactatctgtgtgactccccatctcatgttcgtggtcagcaagtgcaggacgtccgcttaagcgtgtcagagtgccacagaacagcactcgtaagtgggatgtgctgtgccctgttccttctgatcctactcaccggagttctgtgccataggtttcacggcttgtggtacatgaagatgatgtgggcttggctgcaggccaaacggaagccccgaaaagcaccttcccgcaatatttgttatgatgctttcgtgtcttacagcgagagagacgcctattgggtcgaaaacttaatggtgcaggagctcgaaaattttaacccacccttcaagctgtgccttcataagagggatttcatcccgggcaaatggatcattgacaatataatcgattccattgagaagtcacacaaaactgtctttgtgctgagcgaaaacttcgttaagagtgagtggtgtaaatacgagttggacttttctcacttccggctctttgatgaaaataacgacgcggccatcctgattctactggagcctatcgaaaagaaggcaataccccaacgcttctgcaaacttagaaagatcatgaataccaaaacatacctcgagtggccaatggatgaagctcagagggaggggttttgggtgaacctgcgtgccgctattaagtcctga

SEQ ID NO: 9583 - RNA, 2355 nt, synthetic construct
  misc_feature 1..2355: note = derived and/or modified sequence opt4 fromTLR2__Homo_sapiens__AAC34377
  source 1..2355: mol_type = other RNA
atgccccacaccctgtggatggtgtgggtgctgggcgtgatcatcagcctgagcaaggaggagagcagcaaccaggccagcctgagctgcgacagaaacggcatctgcaagggcagcagcggcagcctgaacagcatccccagcggcctgaccgaggccgtgaagagcctggacctgagcaacaacagaatcacctacatcagcaacagcgacctgcagagatgcgtgaacctgcaggccctggtgctgaccagcaacggcatcaacaccatcgaggaggacagcttcagcagcctgggcagcctggagcacctggacctgagctacaactacctgagcaacctgagcagcagctggttcaagcccctgagcagcctgaccttcctgaacctgctgggcaacccctacaagaccctgggcgagaccagcctgttcagccacctgaccaagctgcagatcctgagagtgggcaacatggacaccttcaccaagatccagagaaaggacttcgccggcctgaccttcctggaggagctggagatcgacgccagcgacctgcagagctacgagcccaagagcctgaagagcatccagaacgtgagccacctgatcctgcacatgaagcagcacatcctgctgctggagatcttcgtggacgtgaccagcagcgtggagtgcctggagctgagagacaccgacctggacaccttccacttcagcgagctgagcaccggcgagaccaacagcctgatcaagaagttcaccttcagaaacgtgaagatcaccgacgagagcctgttccaggtgatgaagctgctgaaccagatcagcggcctgctggagctggagttcgacgactgcaccctgaacggcgtgggcaacttcagagccagcgacaacgacagagtgatcgaccccggcaaggtggagaccctgaccatcagaagactgcacatccccagattctacctgttctacgacctgagcaccctgtacagcctgaccgagagagtgaagagaatcaccgtggagaacagcaaggtgttcctggtgccctgcctgctgagccagcacctgaagagcctggagtacctggacctgagcgagaacctgatggtggaggagtacctgaagaacagcgcctgcgaggacgcctggcccagcctgcagaccctgatcctgagacagaaccacctggccagcctggagaagaccggcgagaccctgctgaccctgaagaacctgaccaacatcgacatcagcaagaacagcttccacagcatgcccgagacctgccagtggcccgagaagatgaagtacctgaacctgagcagcaccagaatccacagcgtgaccggctgcatccccaagaccctggagatcctggacgtgagcaacaacaacctgaacctgttcagcctgaacctgccccagctgaaggagctgtacatcagcagaaacaagctgatgaccctgcccgacgccagcctgctgcccatgctgctggtgctgaagatcagcagaaacgccatcaccaccttcagcaaggagcagctggacagcttccacaccctgaagaccctggaggccggcggcaacaacttcatctgcagctgcgagttcctgagcttcacccaggagcagcaggccctggccaaggtgctgatcgactggcccgccaactacctgtgcgacagccccagccacgtgagaggccagcaggtgcaggacgtgagactgagcgtgagcgagtgccacagaaccgccctggtgagcggcatgtgctgcgccctgttcctgctgatcctgctgaccggcgtgctgtgccacagattccacggcctgtggtacatgaagatgatgtgggcctggctgcaggccaagagaaagcccagaaaggcccccagcagaaacatctgctacgacgccttcgtgagctacagcgagagagacgcctactgggtggagaacctgatggtgcaggagctggagaacttcaacccccccttcaagctgtgcctgcacaagagagacttcatccccggcaagtggatcatcgacaacatcatcgacagcatcgagaagagccacaagaccgtgttcgtgctgagcgagaacttcgtgaagagcgagtggtgcaagtacgagctggacttcagccacttcagactgttcgacgagaacaacgacgccgccatcctgatcctgctggagcccatcgagaagaaggccatcccccagagattctgcaagctgagaaagatcatgaacaccaagacctacctggagtggcccatggacgaggcccagagagagggcttctgggtgaacctgagagccgccatcaagagctga

SEQ ID NO: 9584 - RNA, 2355 nt, synthetic construct
  misc_feature 1..2355: note = derived and/or modified sequence opt5 fromTLR2__Homo_sapiens__AAC34377
  source 1..2355: mol_type = other RNA
atgccccacaccctgtggatggtgtgggtcctcggcgttatcattagcctgtccaaggaggaatctagcaaccaggcctccctttcttgcgacagaaatgggatctgtaaaggaagctccggctctctgaacagcattccttccgggctcacagaggctgtcaagagcctggatctttctaataaccggatcacgtacatttccaatagcgacctgcaacgctgcgtgaacctccaggccctggtgctgacctctaatggaatcaacacaatcgaagaggattccttcagctctctcggctccctggaacatcttgacctgagctataattacctctccaacctgtctagctcctggtttaaaccgcttagctctctgaccttcctcaatctgctggggaacccctataagacactcggagagacctccctgtttagccaccttacaaaactgcagattctcagagtgggcaatatggataccttcacgaagatccagcggaaggactttgcgggcctgaccttccttgaggaactggagattgatgcttctgacctccaaagctacgaacctaaatccctgaagtctatccagaacgttagccatctgattctccacatgaaacagcatatcctgcttctggagatttttgtggatgtcacatccagcgtggagtgtctcgaactgcgcgacaccgatcttgacacattccacttttctgagctgtccaccggggaaacgaatagcctcatcaagaaattcacatttagaaacgttaagatcaccgatgagtctctgttccaggtgatgaagctgctcaaccaaatttccggactgcttgaactggagtttgacgactgcacactcaatggcgtcgggaacttccgggccagcgataatgaccgcgtgatcgatcccggaaaagtggagaccctgaccattagacggctgcacatccctcgcttctatctcttttacgacctttccacactgtattctctgacggaaagagtcaagcggattaccgttgagaacagcaaagtgttcctcgtgccctgtctgctttcccagcatctgaagtctctcgaatacctggatctgagcgagaatcttatggtcgaagagtacctcaaaaactccgcctgcgaggacgcttggcctagcctgcagacactgatcctccgccagaatcacctggcctctcttgaaaagaccggcgagacactgctcaccctgaaaaacctgacgaatatcgatatttccaagaacagctttcattctatgccggaaacatgtcaatggcccgagaagatgaaatatcttaatctctccagcaccagaatccactctgtgaccgggtgcattcctaagacactggaaatcctggacgttagcaacaataacctcaatctgttctcccttaacctgccccagctcaaagagctgtacattagccggaacaagctgatgacccttcctgatgcttctctcctgcccatgctgctcgtgctgaaaatctcccgcaatgccatcacaacgtttagcaaggagcagcttgactccttccacaccctgaagacactcgaagcgggaggcaacaattttatttgttcttgcgagttcctgagctttacccaagaacagcaggccctggctaaagtccttatcgattggccggccaactatctgtgtgactccccttctcatgtgagaggccagcaagttcaggacgtgcggctcagcgtctccgagtgccacagaacagctctggtgtctgggatgtgctgtgccctcttcctgcttattctgctcaccggagtcctgtgccatcgctttcacggcctgtggtacatgaagatgatgtgggcgtggcttcaggccaaacggaagcccagaaaagctcctagccgcaatatctgttatgatgccttcgtgtcctacagcgagcgggacgcttattgggttgaaaacctgatggtgcaggagctcgaaaattttaaccctcccttcaagctgtgcctccataagagagatttcattcccgggaaatggatcattgacaatatcatcgattctattgagaagtcccacaaaacggtctttgtgctgagcgaaaacttcgttaagtctgagtggtgtaaatacgagcttgacttttcccacttccgcctgtttgatgaaaataacgacgccgccatcctcattctgctggagccgatcgaaaagaaggctattccccaacggttctgcaaacttagaaagatcatgaataccaaaacatacctggagtggcctatggatgaagcgcagcgcgagggattttgggtgaacctccgggccgctatcaagagctga

SEQ ID NO: 9585 - protein, 904 aa, synthetic construct
  REGION 1..904: note = TLR3__Homo_sapiens__O15455
MRQTLPCIYFWGGLLPFGMLCASSTTKCTVSHEVADCSHLKLTQVPDDLPTNITVLNLTHNQLRRLPAANFTRYSQLTSLDVGFNTISKLEPELCQKLPMLKVLNLQHNELSQLSDKTFAFCTNLTELHLMSNSIQKIKNNPFVKQKNLITLDLSHNGLSSTKLGTQVQLENLQELLLSNNKIQALKSEELDIFANSSLKKLELSSNQIKEFSPGCFHAIGRLFGLFLNNVQLGPSLTEKLCLELANTSIRNLSLSNSQLSTTSNTTFLGLKWTNLTMLDLSYNNLNVVGNDSFAWLPQLEYFFLEYNNIQHLFSHSLHGLFNVRYLNLKRSFTKQSISLASLPKIDDFSFQWLKCLEHLNMEDNDIPGIKSNMFTGLINLKYLSLSNSFTSLRTLTNETFVSLAHSPLHILNLTKNKISKIESDAFSWLGHLEVLDLGLNEIGQELTGQEWRGLENIFEIYLSYNKYLQLTRNSFALVPSLQRLMLRRVALKNVDSSPSPFQPLRNLTILDLSNNNIANINDDMLEGLEKLEILDLQHNNLARLWKHANPGGPIYFLKGLSHLHILNLESNGFDEIPVEVFKDLFELKIIDLGLNNLNTLPASVFNNQVSLKSLNLQKNLITSVEKKVFGPAFRNLTELDMRFNPFDCTCESIAWFVNWINETHTNIPELSSHYLCNTPPHYHGFPVRLFDTSSCKDSAPFELFFMINTSILLIFIFIVLLIHFEGWRISFYWNVSVHRVLGFKEIDRQTEQFEYAAYIIHAYKDKDWVWEHFSSMEKEDQSLKFCLEERDFEAGVFELEAIVNSIKRSRKIIFVITHHLLKDPLCKRFKVHHAVQQAIEQNLDSIILVFLEEIPDYKLNHALCLRRGMFKSHCILNWPVQKERIGAFRHKLQVALGSKNSVH

SEQ ID NO: 9586 - RNA, 2715 nt, synthetic construct
  misc_feature 1..2715: note = TLR3__Homo_sapiens__AAC34134
  source 1..2715: mol_type = other RNA
atgagacagactttgccttgtatctacttttgggggggccttttgccctttgggatgctgtgtgcatcctccaccaccaagtgcactgttagccatgaagttgctgactgcagccacctgaagttgactcaggtacccgatgatctacccacaaacataacagtgttgaaccttacccataatcaactcagaagattaccagccgccaacttcacaaggtatagccagctaactagcttggatgtaggatttaacaccatctcaaaactggagccagaattgtgccagaaacttcccatgttaaaagttttgaacctccagcacaatgagctatctcaactttctgataaaacctttgccttctgcacgaatttgactgaactccatctcatgtccaactcaatccagaaaattaaaaataatccctttgtcaagcagaagaatttaatcacattagatctgtctcataatggcttgtcatctacaaaattaggaactcaggttcagctggaaaatctccaagagcttctattatcaaacaataaaattcaagcgctaaaaagtgaagaactggatatctttgccaattcatctttaaaaaaattagagttgtcatcgaatcaaattaaagagttttctccagggtgttttcacgcaattggaagattatttggcctctttctgaacaatgtccagctgggtcccagccttacagagaagctatgtttggaattagcaaacacaagcattcggaatctgtctctgagtaacagccagctgtccaccaccagcaatacaactttcttgggactaaagtggacaaatctcactatgctcgatctttcctacaacaacttaaatgtggttggtaacgattcctttgcttggcttccacaactagaatatttcttcctagagtataataatatacagcatttgttttctcactctttgcacgggcttttcaatgtgaggtacctgaatttgaaacggtcttttactaaacaaagtatttcccttgcctcactccccaagattgatgatttttcttttcagtggctaaaatgtttggagcaccttaacatggaagataatgatattccaggcataaaaagcaatatgttcacaggattgataaacctgaaatacttaagtctatccaactcctttacaagtttgcgaactttgacaaatgaaacatttgtatcacttgctcattctcccttacacatactcaacctaaccaagaataaaatctcaaaaatagagagtgatgctttctcttggttgggccacctagaagtacttgacctgggccttaatgaaattgggcaagaactcacaggccaggaatggagaggtctagaaaatattttcgaaatctatctttcctacaacaagtacctgcagctgactaggaactcctttgccttggtcccaagccttcaacgactgatgctccgaagggtggcccttaaaaatgtggatagctctccttcaccattccagcctcttcgtaacttgaccattctggatctaagcaacaacaacatagccaacataaatgatgacatgttggagggtcttgagaaactagaaattctcgatttgcagcataacaacttagcacggctctggaaacacgcaaaccctggtggtcccatttatttcctaaagggtctgtctcacctccacatccttaacttggagtccaacggctttgacgagatcccagttgaggtcttcaaggatttatttgaactaaagatcatcgatttaggattgaataatttaaacacacttccagcatctgtctttaataatcaggtgtctctaaagtcattgaaccttcagaagaatctcataacatccgttgagaagaaggttttcgggccagctttcaggaacctgactgagttagatatgcgctttaatccctttgattgcacgtgtgaaagtattgcctggtttgttaattggattaacgagacccataccaacatccctgagctgtcaagccactacctttgcaacactccacctcactatcatgggttcccagtgagactttttgatacatcatcttgcaaagacagtgccccctttgaactctttttcatgatcaataccagtatcctgttgatttttatctttattgtacttctcatccactttgagggctggaggatatctttttattggaatgtttcagtacatcgagttcttggtttcaaagaaatagacagacagacagaacagtttgaatatgcagcatatataattcatgcctataaagataaggattgggtctgggaacatttctcttcaatggaaaaggaagaccaatctctcaaattttgtctggaagaaagggactttgaggcgggtgtttttgaactagaagcaattgttaacagcatcaaaagaagcagaaaaattatttttgttataacacaccatctattaaaagacccattatgcaaaagattcaaggtacatcatgcagttcaacaagctattgaacaaaatctggattccattatattggttttccttgaggagattccagattataaactgaaccatgcactctgtttgcgaagaggaatgtttaaatctcactgcatcttgaactggccagttcagaaagaacggataggtgcctttcgtcataaattgcaagtagcacttggatccaaaaactctgtacattaa

SEQ ID NO: 9587 - RNA, 2715 nt, synthetic construct
  misc_feature 1..2715: note = derived and/or modified sequence opt1 fromTLR3__Homo_sapiens__AAC34134
  source 1..2715: mol_type = other RNA
atgcgccagaccctgccctgcatctacttctggggcgggctcctgccgttcggcatgctgtgcgccagctccaccacgaagtgcaccgtgagccacgaggtcgccgactgctcccacctcaagctgacccaggtgcccgacgacctgcccaccaacatcacggtgctcaacctgacccacaaccagctgcggcgcctccccgcggccaacttcacccggtacagccagctgacctccctggacgtcgggttcaacacgatcagcaagctcgagccggagctgtgccagaagctgcccatgctcaaggtgctgaacctgcagcacaacgagctctcccagctgagcgacaagaccttcgccttctgcaccaacctgaccgagctccacctgatgtccaacagcatccagaagatcaagaacaaccccttcgtgaagcagaagaacctgatcacgctcgacctgtcccacaacggcctgagctccaccaagctcgggacccaggtccagctggagaacctgcaggagctcctgctgagcaacaacaagatccaggccctcaagtccgaggagctggacatcttcgccaacagctccctgaagaagctcgagctgagctccaaccagatcaaggagttcagccccggctgcttccacgcgatcggccgcctgttcggcctcttcctgaacaacgtgcagctggggccgagcctcaccgagaagctgtgcctggagctcgccaacacgtccatccggaacctgagcctgtccaacagccagctctccaccaccagcaacaccacgttcctggggctgaagtggaccaacctgaccatgctcgacctgtcctacaacaacctgaacgtggtcggcaacgacagcttcgcctggctcccccagctggagtacttcttcctggagtacaacaacatccagcacctcttctcccacagcctgcacgggctgttcaacgtgcgctacctcaacctgaagcggtccttcaccaagcagagcatctccctggccagcctccccaagatcgacgacttctccttccagtggctgaagtgcctggagcacctcaacatggaggacaacgacatccccggcatcaagagcaacatgttcacgggcctgatcaacctgaagtacctctccctgagcaactccttcaccagcctgcgcaccctcaccaacgagacgttcgtgagcctggcgcactccccgctgcacatcctcaacctgaccaagaacaagatcagcaagatcgagtccgacgccttcagctggctggggcacctcgaggtcctggacctgggcctcaacgagatcgggcaggagctgaccggccaggagtggcggggcctggagaacatcttcgagatctacctctcctacaacaagtacctgcagctgacccgcaacagcttcgccctcgtgccctccctgcagcggctgatgctccgccgggtggccctgaagaacgtcgacagctcccccagccccttccagccgctgcgcaacctcacgatcctggacctgtccaacaacaacatcgccaacatcaacgacgacatgctcgaggggctggagaagctggagatcctcgacctgcagcacaacaacctggcgcggctctggaagcacgccaaccccggcgggcccatctacttcctgaagggcctgagccacctccacatcctgaacctggagtccaacgggttcgacgagatccccgtggaggtgttcaaggacctcttcgagctgaagatcatcgacctgggcctcaacaacctgaacaccctgccggccagcgtcttcaacaaccaggtgtccctcaagagcctgaacctgcagaagaacctcatcacctccgtggagaagaaggtcttcggccccgccttccgcaacctgaccgagctggacatgcggttcaaccccttcgactgcacgtgcgagagcatcgcctggttcgtgaactggatcaacgagacccacaccaacatccccgagctcagctcccactacctgtgcaacaccccgccccactaccacgggttccccgtgcgcctgttcgacaccagctcctgcaaggacagcgcgcccttcgagctgttcttcatgatcaacacgtccatcctgctgatcttcatcttcatcgtcctcctgatccacttcgagggctggcggatcagcttctactggaacgtgtccgtccaccgcgtgctggggttcaaggagatcgaccggcagaccgagcagttcgagtacgccgcctacatcatccacgcctacaaggacaaggactgggtgtgggagcacttcagctccatggagaaggaggaccagagcctcaagttctgcctggaggagcgcgacttcgaggccggcgtcttcgagctggaggcgatcgtgaactccatcaagcgcagccggaagatcatcttcgtgatcacccaccacctcctgaaggacccgctgtgcaagcgcttcaaggtccaccacgccgtgcagcaggccatcgagcagaacctcgactccatcatcctggtgttcctggaggagatccccgactacaagctcaaccacgccctgtgcctgcggcgcgggatgttcaagagccactgcatcctcaactggcccgtccagaaggagcggatcggcgccttccgccacaagctccaggtggcgctgggctccaagaacagcgtgcactga

SEQ ID NO: 9588 - RNA, 2715 nt, synthetic construct
  misc_feature 1..2715: note = derived and/or modified sequence opt2 fromTLR3__Homo_sapiens__AAC34134
  source 1..2715: mol_type = other RNA
atgcgccagaccctcccctgcatctacttctggggcggcctcctccccttcggcatgctctgcgcctcctccaccaccaagtgcaccgtctcccacgaggtcgccgactgctcccacctcaagctcacccaggtccccgacgacctccccaccaacatcaccgtcctcaacctcacccacaaccagctccgccgcctccccgccgccaacttcacccgctactcccagctcacctccctcgacgtcggcttcaacaccatctccaagctcgagcccgagctctgccagaagctccccatgctcaaggtcctcaacctccagcacaacgagctctcccagctctccgacaagaccttcgccttctgcaccaacctcaccgagctccacctcatgtccaactccatccagaagatcaagaacaaccccttcgtcaagcagaagaacctcatcaccctcgacctctcccacaacggcctctcctccaccaagctcggcacccaggtccagctcgagaacctccaggagctcctcctctccaacaacaagatccaggccctcaagtccgaggagctcgacatcttcgccaactcctccctcaagaagctcgagctctcctccaaccagatcaaggagttctcccccggctgcttccacgccatcggccgcctcttcggcctcttcctcaacaacgtccagctcggcccctccctcaccgagaagctctgcctcgagctcgccaacacctccatccgcaacctctccctctccaactcccagctctccaccacctccaacaccaccttcctcggcctcaagtggaccaacctcaccatgctcgacctctcctacaacaacctcaacgtcgtcggcaacgactccttcgcctggctcccccagctcgagtacttcttcctcgagtacaacaacatccagcacctcttctcccactccctccacggcctcttcaacgtccgctacctcaacctcaagcgctccttcaccaagcagtccatctccctcgcctccctccccaagatcgacgacttctccttccagtggctcaagtgcctcgagcacctcaacatggaggacaacgacatccccggcatcaagtccaacatgttcaccggcctcatcaacctcaagtacctctccctctccaactccttcacctccctccgcaccctcaccaacgagaccttcgtctccctcgcccactcccccctccacatcctcaacctcaccaagaacaagatctccaagatcgagtccgacgccttctcctggctcggccacctcgaggtcctcgacctcggcctcaacgagatcggccaggagctcaccggccaggagtggcgcggcctcgagaacatcttcgagatctacctctcctacaacaagtacctccagctcacccgcaactccttcgccctcgtcccctccctccagcgcctcatgctccgccgcgtcgccctcaagaacgtcgactcctccccctcccccttccagcccctccgcaacctcaccatcctcgacctctccaacaacaacatcgccaacatcaacgacgacatgctcgagggcctcgagaagctcgagatcctcgacctccagcacaacaacctcgcccgcctctggaagcacgccaaccccggcggccccatctacttcctcaagggcctctcccacctccacatcctcaacctcgagtccaacggcttcgacgagatccccgtcgaggtcttcaaggacctcttcgagctcaagatcatcgacctcggcctcaacaacctcaacaccctccccgcctccgtcttcaacaaccaggtctccctcaagtccctcaacctccagaagaacctcatcacctccgtcgagaagaaggtcttcggccccgccttccgcaacctcaccgagctcgacatgcgcttcaaccccttcgactgcacctgcgagtccatcgcctggttcgtcaactggatcaacgagacccacaccaacatccccgagctctcctcccactacctctgcaacacccccccccactaccacggcttccccgtccgcctcttcgacacctcctcctgcaaggactccgcccccttcgagctcttcttcatgatcaacacctccatcctcctcatcttcatcttcatcgtcctcctcatccacttcgagggctggcgcatctccttctactggaacgtctccgtccaccgcgtcctcggcttcaaggagatcgaccgccagaccgagcagttcgagtacgccgcctacatcatccacgcctacaaggacaaggactgggtctgggagcacttctcctccatggagaaggaggaccagtccctcaagttctgcctcgaggagcgcgacttcgaggccggcgtcttcgagctcgaggccatcgtcaactccatcaagcgctcccgcaagatcatcttcgtcatcacccaccacctcctcaaggaccccctctgcaagcgcttcaaggtccaccacgccgtccagcaggccatcgagcagaacctcgactccatcatcctcgtcttcctcgaggagatccccgactacaagctcaaccacgccctctgcctccgccgcggcatgttcaagtcccactgcatcctcaactggcccgtccagaaggagcgcatcggcgccttccgccacaagctccaggtcgccctcggctccaagaactccgtccactga

SEQ ID NO: 9589 - RNA, 2715 nt, synthetic construct
  misc_feature 1..2715: note = derived and/or modified sequence opt3 fromTLR3__Homo_sapiens__AAC34134
  source 1..2715: mol_type = other RNA
atgagacagaccctgccctgcatctacttctggggcgggctccttccttttggaatgctgtgtgccagctccacaactaagtgcacggtgtctcacgaggtcgctgactgttcacatttgaaattaacccaagttccagatgacctgccgacaaacattactgtgctaaatctcacccacaaccagctgaggcggcttcccgcagccaatttcacacgctatagtcagctgaccagcttggatgtaggttttaacactatatccaagctcgaacctgagctgtgccagaaactgccaatgctcaaggtgttaaatctgcaacataacgaactttctcagttgtcggacaaaacattcgcgttttgtaccaatctgacggagctacacctcatgtcaaacagcatccagaagattaagaataaccccttcgtcaaacagaagaatctgatcactcttgatctgagtcataacggcttgtcctctaccaaactcgggacacaagtgcagctggaaaatttacaggagctgctccttagcaacaataagattcaggctctgaaatccgaggaattggacatctttgccaactcaagtctaaagaagctggagctcagctctaaccaaataaaagagttctcccctggatgctttcacgcaatcggccgactgttcggtctttttctgaataacgttcagttggggccatcactcactgaaaagctgtgtttagagctggccaataccagcattcgtaacctaagtctctctaattcccagctgagcacaacctcgaacacgactttccttggattgaaatggacaaatctgaccatgctcgatctgtcttacaacaatcttaacgtggtcggcaatgactcctttgcttggctgccccaattggaatatttcttcctcgagtacaacaatatccagcacctgttttcacatagtttacacggcctgttcaacgtgagatatctaaatctcaagaggagctttactaaacagtccatttctctggcaagccttcctaagatcgatgacttctcatttcagtggttgaaatgcctggaacatctcaacatggaggataacgacataccagggattaagagtaatatgttcacaggactgatcaacttaaagtacctgtcccttagcaattcttttacctcattgcggacgctcaccaacgaaacattcgtaagtctggcccacagcccgctacacattctgaatctcactaaaaacaagatctccaaaatcgagtctgatgctttttcgtggctgggtcatcttgaggttttggacctgggcttaaatgaaattgggcaagagctcaccggacaggaatggcgcggcctggagaacatattcgaaatctatcttagctacaataagtacctgcagttgacaagaaactcctttgccctcgtgccctcactgcagaggctaatgctgcggcgcgtcgcgctcaaaaatgtggacagttctcctagcccattccaacccctgcgaaaccttactattttggatctgtccaataacaatatcgcaaacataaacgacgatatgttagagggtctcgagaagctggaaattcttgacctgcagcacaataacctagccagactctggaagcatgctaatcctgggggaccaatctattttctgaaaggcttgtcacatctgcacatcttaaacctcgagagcaatggcttcgatgaaattcccgtggaggtcttcaaggacctgtttgaacttaaaatcattgatctggggttgaacaatctcaacaccctgccggcctctgttttcaataaccaggtgtccctaaagagtctgaatcttcagaaaaacctcataacaagcgtagagaagaaggtgtttggacctgcattcaggaatctgaccgagttggacatgcggtttaaccccttcgattgtacttgcgaatctatcgcttggtttgtcaattggattaacgagacgcacacaaacatcccagaactgtcctcacactacttatgtaatacccctccccattatcacggtttcccagtgcgtctctttgacaccagtagctgcaaagattcggcccccttcgagctgtttttcatgatcaacacttccattcttctgatatttatcttcattgttttgctcatccatttcgagggctggcgcatttctttttactggaatgtgagcgtccacagagtgctggggttcaaggaaatcgacaggcaaacagagcagtttgaatatgcggcctacataatccacgcatataaagacaaggattgggtatgggagcatttctcaagtatggaaaaagaggaccagtccctaaagttttgcctggaggaacgggatttcgaggctggagtttttgaacttgaggccattgtgaactctatcaagcgaagccgcaaaattatcttcgtcataacccaccatctcctgaaggaccctttgtgtaaaagatttaaggtgcaccatgctgtccagcaagccattgaacagaatttagattccatcattctggtgttcctcgaggagatcccagactacaaactgaaccacgcactttgcctgaggcggggcatgtttaagtcacactgtatattgaattggccggttcagaaagaacgcatcggtgccttcagacataagctacaagtggctctggggagcaagaacagtgtacactga

SEQ ID NO: 9590 - RNA, 2715 nt, synthetic construct
  misc_feature 1..2715: note = derived and/or modified sequence opt4 fromTLR3__Homo_sapiens__AAC34134
  source 1..2715: mol_type = other RNA
atgagacagaccctgccctgcatctacttctggggcggcctgctgcccttcggcatgctgtgcgccagcagcaccaccaagtgcaccgtgagccacgaggtggccgactgcagccacctgaagctgacccaggtgcccgacgacctgcccaccaacatcaccgtgctgaacctgacccacaaccagctgagaagactgcccgccgccaacttcaccagatacagccagctgaccagcctggacgtgggcttcaacaccatcagcaagctggagcccgagctgtgccagaagctgcccatgctgaaggtgctgaacctgcagcacaacgagctgagccagctgagcgacaagaccttcgccttctgcaccaacctgaccgagctgcacctgatgagcaacagcatccagaagatcaagaacaaccccttcgtgaagcagaagaacctgatcaccctggacctgagccacaacggcctgagcagcaccaagctgggcacccaggtgcagctggagaacctgcaggagctgctgctgagcaacaacaagatccaggccctgaagagcgaggagctggacatcttcgccaacagcagcctgaagaagctggagctgagcagcaaccagatcaaggagttcagccccggctgcttccacgccatcggcagactgttcggcctgttcctgaacaacgtgcagctgggccccagcctgaccgagaagctgtgcctggagctggccaacaccagcatcagaaacctgagcctgagcaacagccagctgagcaccaccagcaacaccaccttcctgggcctgaagtggaccaacctgaccatgctggacctgagctacaacaacctgaacgtggtgggcaacgacagcttcgcctggctgccccagctggagtacttcttcctggagtacaacaacatccagcacctgttcagccacagcctgcacggcctgttcaacgtgagatacctgaacctgaagagaagcttcaccaagcagagcatcagcctggccagcctgcccaagatcgacgacttcagcttccagtggctgaagtgcctggagcacctgaacatggaggacaacgacatccccggcatcaagagcaacatgttcaccggcctgatcaacctgaagtacctgagcctgagcaacagcttcaccagcctgagaaccctgaccaacgagaccttcgtgagcctggcccacagccccctgcacatcctgaacctgaccaagaacaagatcagcaagatcgagagcgacgccttcagctggctgggccacctggaggtgctggacctgggcctgaacgagatcggccaggagctgaccggccaggagtggagaggcctggagaacatcttcgagatctacctgagctacaacaagtacctgcagctgaccagaaacagcttcgccctggtgcccagcctgcagagactgatgctgagaagagtggccctgaagaacgtggacagcagccccagccccttccagcccctgagaaacctgaccatcctggacctgagcaacaacaacatcgccaacatcaacgacgacatgctggagggcctggagaagctggagatcctggacctgcagcacaacaacctggccagactgtggaagcacgccaaccccggcggccccatctacttcctgaagggcctgagccacctgcacatcctgaacctggagagcaacggcttcgacgagatccccgtggaggtgttcaaggacctgttcgagctgaagatcatcgacctgggcctgaacaacctgaacaccctgcccgccagcgtgttcaacaaccaggtgagcctgaagagcctgaacctgcagaagaacctgatcaccagcgtggagaagaaggtgttcggccccgccttcagaaacctgaccgagctggacatgagattcaaccccttcgactgcacctgcgagagcatcgcctggttcgtgaactggatcaacgagacccacaccaacatccccgagctgagcagccactacctgtgcaacacccccccccactaccacggcttccccgtgagactgttcgacaccagcagctgcaaggacagcgcccccttcgagctgttcttcatgatcaacaccagcatcctgctgatcttcatcttcatcgtgctgctgatccacttcgagggctggagaatcagcttctactggaacgtgagcgtgcacagagtgctgggcttcaaggagatcgacagacagaccgagcagttcgagtacgccgcctacatcatccacgcctacaaggacaaggactgggtgtgggagcacttcagcagcatggagaaggaggaccagagcctgaagttctgcctggaggagagagacttcgaggccggcgtgttcgagctggaggccatcgtgaacagcatcaagagaagcagaaagatcatcttcgtgatcacccaccacctgctgaaggaccccctgtgcaagagattcaaggtgcaccacgccgtgcagcaggccatcgagcagaacctggacagcatcatcctggtgttcctggaggagatccccgactacaagctgaaccacgccctgtgcctgagaagaggcatgttcaagagccactgcatcctgaactggcccgtgcagaaggagagaatcggcgccttcagacacaagctgcaggtggccctgggcagcaagaacagcgtgcactga

SEQ ID NO: 9591 - RNA, 2715 nt, synthetic construct
  misc_feature 1..2715: note = derived and/or modified sequence opt5 fromTLR3__Homo_sapiens__AAC34134
  source 1..2715: mol_type = other RNA
atgagacagaccctgccctgcatctacttctggggcgggctcctgccttttggaatgctttgtgccagctccacaacgaagtgcaccgtgtctcacgaggtcgctgactgtagccatctgaaactcacacaagttccggatgacctgcccaccaacattacagtgcttaatctgacccacaaccagctccggcgcctgcctgccgcgaatttcacaagatattcccagctgacctctctcgatgtgggctttaacacgatcagcaagctggaacccgagctttgccagaaactgcctatgctcaaggtcctgaatcttcaacataacgaactgtcccagctctctgacaaaaccttcgctttttgtacaaatctgaccgagctgcacctcatgagcaactccattcagaagatcaagaataaccccttcgtgaaacagaagaatctgattacacttgatctgagccataacgggctctcttccaccaaactgggaacgcaagttcagcttgaaaatctgcaggagctcctgctgagcaacaataagatccaggccctcaaatctgaggaactggacatctttgccaactccagccttaagaagctggagctctcttccaaccaaattaaagagttcagccctggctgctttcacgctatcgggcggctgttcggactttttctgaataacgtgcagctcggcccgtccctgacagaaaagctgtgtctcgagctggccaatacctctattcgcaaccttagcctgtccaatagccagctctctacaacctccaacaccacattcctgggcctgaaatggacgaatcttaccatgctcgatctgagctacaacaatctgaacgtcgtggggaatgactcttttgcttggctcccccaactggaatatttcttccttgagtacaacaatatccagcacctgtttagccattccctccacggactgttcaacgttagatatctgaatcttaagcggtcttttacaaaacagagcatttccctcgccagcctgcctaagatcgatgacttctcttttcagtggctgaaatgcctcgaacatctgaacatggaggataacgacattcccggcatcaagtccaatatgttcaccgggcttatcaacctgaagtacctcagcctgtctaattcctttacaagcctgcgcacccttacgaacgaaacattcgtgtccctcgcgcactctcctctgcacattctgaatctcaccaaaaacaagatcagcaaaattgagtccgatgccttttcttggctgggacatcttgaggtcctggacctcggcctgaatgaaatcgggcaagagctgaccggacaggaatggagaggccttgagaacattttcgaaatctatctcagctacaataagtacctgcagctgacacggaactcctttgctctcgtgcccagcctgcagcgccttatgctgagacgggtggccctcaaaaatgtcgactcttccccgagccctttccaacccctgcgcaacctgaccatccttgatctgtctaataacaatattgctaacatcaacgacgatatgctcgagggcctggagaagctcgaaattctggaccttcagcacaataacctggccagactctggaagcatgcgaatcctgggggacccatctattttctgaaaggcctgtcccaccttcatattctgaacctcgagagcaatgggttcgatgaaatccccgttgaggtgttcaaggacctgtttgaactcaaaatcattgatctgggacttaacaatctgaacacactccctgcctctgtgttcaataaccaggtcagcctgaagtccctgaatcttcagaaaaacctgatcacgagcgtggagaagaaggtttttggcccggctttccggaatctcaccgagctggacatgcgctttaaccccttcgattgtacatgcgaatctattgcctggtttgtgaattggatcaacgagacccacacaaacattcctgaactctccagccactacctgtgtaatacgccccctcattatcacgggttccccgtcagactttttgacacctcctcttgcaaagatagcgctccgttcgagctgtttttcatgatcaacacctccattctgctcatctttatcttcattgtgctgcttatccatttcgagggatggcggatttctttttactggaatgttagcgtgcacagagtcctgggcttcaaggaaatcgaccgccaaacagagcagtttgaatatgccgcctacattatccacgcttataaagacaaggattgggtgtgggagcatttctcctctatggaaaaagaggaccagagcctcaagttttgcctggaggaacgggatttcgaggcgggcgtctttgaactcgaggccatcgtgaactccattaagagaagccgcaaaatcattttcgttatcacccaccatctgcttaaggaccctctgtgtaaacggtttaaggtgcaccatgctgtccagcaagccattgaacagaatctggattctatcatcctcgtgttcctggaggagattcccgactacaaacttaaccacgccctgtgcctcagacgcgggatgtttaagtcccactgtatcctgaattggcctgttcagaaagaacggattggagctttcagacataagctccaagtggccctgggcagcaagaactctgtccactga

SEQ ID NO: 9592 - protein, 839 aa, synthetic construct [sequence omitted]

SEQ ID NO: 9593 - RNA, 2520 nt, synthetic construct
  misc_feature 1..2520: note = TLR4__Homo_sapiens__AAY82270
  source 1..2520: mol_type = other RNA
atgatgtctgcctcgcgcctggctgggactctgatcccagccatggccttcctctcctgcgtgagaccagaaagctgggagccctgcgtggaggtggttcctaatattacttatcaatgcatggagctgaatttctacaaaatccccgacaacctccccttctcaaccaagaacctggacctgagctttaatcccctgaggcatttaggcagctatagcttcttcagtttcccagaactgcaggtgctggatttatccaggtgtgaaatccagacaattgaagatggggcatatcagagcctaagccacctctctaccttaatattgacaggaaaccccatccagagtttagccctgggagccttttctggactatcaagtttacagaagctggtggctgtggagacaaatctagcatctctagagaacttccccattggacatctcaaaactttgaaagaacttaatgtggctcacaatcttatccaatctttcaaattacctgagtatttttctaatctgaccaatctagagcacttggacctttccagcaacaagattcaaagtatttattgcacagacttgcgggttctacatcaaatgcccctactcaatctctctttagacctgtccctgaaccctatgaactttatccaaccaggtgcatttaaagaaattaggcttcataagctgactttaagaaataattttgatagtttaaatgtaatgaaaacttgtattcaaggtctggctggtttagaagtccatcgtttggttctgggagaatttagaaatgaaggaaacttggaaaagtttgacaaatctgctctagagggcctgtacaatttgaccattgaagaattccgattagcatacttagactactacctcgatgatattattgacttatttaattgtttgacaaatgtttcttcattttccctggtgagtgtgactattgaaagggtaaaagacttttcttataatttcggatggcaacatttagaattagttaactgtaaatttggacagtttcccacattgaaactcaaatctctcaaaaggcttactttcacttccaacaaaggtgggaatgctttttcagaagttgatctaccaagccttgagtttctagatctcagtagaaatggcttgagtttcaaaggttgctgttctcaaagtgattttgggacaaccagcctaaagtatttagatctgagcttcaatggtgttattaccatgagttcaaacttcttgggcttagaacaactagaacatctggatttccagcattccaatttgaaacaaatgagtgagttttcagtattcctatcactcagaaacctcatttaccttgacatttctcatactcacaccagagttgctttcaatggcatcttcaatggcttgtccagtctcgaagtcttgaaaatggctggcaattctttccaggaaaacttccttccagatatcttcacagagctgagaaacttgaccttcctggacctctctcagtgtcaactggagcagttgtctccaacagcatttaactcactctccagtcttcaggtactaaatatgagccacaacaacttcttttcattggatacgtttccttataagtgtctgaactccctccaggttcttgattacagtctcaatcacataatgacttccaaaaaacaggaactacagcattttccaagtagtctagctttcttaaatcttactcagaatgactttgcttgtacttgtgaacaccagagtttcctgcaatggatcaaggaccagaggcagctcttggtggaagttgaacgaatggaatgtgcaacaccttcagataagcagggcatgcctgtgctgagtttgaatatcacctgtcagatgaataagaccatcattggtgtgtcggtcctcagtgtgcttgtagtatctgttgtagcagttctggtctataagttctattttcacctgatgcttcttgctggctgcataaagtatggtagaggtgaaaacatctatgatgcctttgttatctactcaagccaggatgaggactgggtaaggaatgagctagtaaagaatttagaagaaggggtgcctccatttcagctctgccttcactacagagactttattcccggtgtggccattgctgccaacatcatccatgaaggtttccataaaagccgaaaggtgattgttgtggtgtcccagcacttcatccagagccgctggtgtatctttgaatatgagattgctcagacctggcagtttctgagcagtcgtgctggtatcatcttcattgtcctgcagaaggtggagaagaccctgctcaggcagcaggtggagctgtaccgccttctcagcaggaacacttacctggagtgggaggacagtgtcctggggcggcacatcttctggagacgactcagaaaagccctgctggatggtaaatcatggaatccagaaggaacagtgggtacaggatgcaattggcaggaagcaacatctatctga

SEQ ID NO: 9594 - RNA, 2520 nt, synthetic construct
  misc_feature 1..2520: note = derived and/or modified sequence opt1 fromTLR4__Homo_sapiens__AAY82270
  source 1..2520: mol_type = other RNA
atgatgagcgcctcccgcctggccggcaccctcatccccgcgatggccttcctgagctgcgtgcggccggagtcctgggagccctgcgtcgaggtggtgcccaacatcacctaccagtgcatggagctgaacttctacaagatccccgacaacctcccgttcagcacgaagaacctggacctgtccttcaaccccctccgccacctggggagctactccttcttcagcttccccgagctgcaggtcctcgacctgtcccggtgcgagatccagaccatcgaggacggcgcctaccagagcctgtcccacctcagcaccctgatcctgaccgggaaccccatccagtccctcgccctgggcgccttcagcgggctgtccagcctccagaagctggtggcggtggagacgaacctggcctccctcgagaacttcccgatcggccacctgaagaccctgaaggagctcaacgtcgcccacaacctgatccagagcttcaagctgcccgagtacttctccaacctcaccaacctggagcacctggacctcagcagcaacaagatccagtccatctactgcaccgacctgcgcgtgctgcaccagatgcccctcctgaacctgagcctcgacctgtccctgaaccccatgaacttcatccagccgggcgccttcaaggagatccggctccacaagctgacgctgcgcaacaacttcgacagcctcaacgtgatgaagacctgcatccaggggctggcgggcctggaggtccaccggctcgtgctgggggagttccgcaacgagggcaacctggagaagttcgacaagtccgccctcgaggggctgtacaacctgaccatcgaggagttccggctggcctacctcgactactacctggacgacatcatcgacctgttcaactgcctcaccaacgtgagctccttcagcctggtctccgtgacgatcgagcgcgtgaaggacttcagctacaacttcggctggcagcacctggagctcgtcaactgcaagttcggccagttccccaccctgaagctgaagtccctcaagcggctgaccttcaccagcaacaagggcgggaacgccttctccgaggtggacctgcccagcctcgagttcctggacctgtcccgcaacgggctcagcttcaagggctgctgctcccagagcgacttcggcacgacctccctgaagtacctggacctcagcttcaacggggtgatcaccatgagctccaacttcctgggcctggagcagctcgagcacctggacttccagcacagcaacctgaagcagatgtccgagttcagcgtcttcctctccctgcggaacctgatctacctcgacatcagccacacccacacgcgcgtggccttcaacgggatcttcaacggcctgtccagcctggaggtgctcaagatggcggggaactccttccaggagaacttcctgcccgacatcttcaccgagctgcggaacctcaccttcctggacctgagccagtgccagctcgagcagctgtccccgaccgccttcaacagcctgtccagcctccaggtcctgaacatgtcccacaacaacttcttcagcctggacacgttcccctacaagtgcctcaactccctccaggtgctggactacagcctgaaccacatcatgaccagcaagaagcaggagctgcagcacttcccctccagcctggccttcctcaacctgacccagaacgacttcgcctgcacgtgcgagcaccagtccttcctgcagtggatcaaggaccagcgccagctcctggtggaggtcgagcggatggagtgcgccacccccagcgacaagcagggcatgccggtgctgtccctcaacatcacgtgccagatgaacaagaccatcatcggcgtcagcgtgctgtccgtgctggtcgtgagcgtggtcgcggtgctcgtgtacaagttctacttccacctgatgctgctcgccgggtgcatcaagtacggccgcggggagaacatctacgacgccttcgtcatctactccagccaggacgaggactgggtgcggaacgagctggtgaagaacctggaggagggcgtcccgcccttccagctctgcctgcactaccgcgacttcatccccggggtggccatcgccgcgaacatcatccacgagggcttccacaagtcccggaaggtgatcgtcgtggtgagccagcacttcatccagtcccgctggtgcatcttcgagtacgagatcgcccagacctggcagttcctgagctcccgcgccggcatcatcttcatcgtcctccagaaggtggagaagaccctgctgcggcagcaggtcgagctctaccgcctgctgagccggaacacctacctcgagtgggaggactccgtgctggggcgccacatcttctggcggcgcctgcggaaggccctcctggacggcaagagctggaaccccgaggggaccgtgggcaccgggtgcaactggcaggaggccacgtccatctga

SEQ ID NO: 9595 - RNA, 2520 nt, synthetic construct
  misc_feature 1..2520: note = derived and/or modified sequence opt2 fromTLR4__Homo_sapiens__AAY82270
  source 1..2520: mol_type = other RNA
atgatgtccgcctcccgcctcgccggcaccctcatccccgccatggccttcctctcctgcgtccgccccgagtcctgggagccctgcgtcgaggtcgtccccaacatcacctaccagtgcatggagctcaacttctacaagatccccgacaacctccccttctccaccaagaacctcgacctctccttcaaccccctccgccacctcggctcctactccttcttctccttccccgagctccaggtcctcgacctctcccgctgcgagatccagaccatcgaggacggcgcctaccagtccctctcccacctctccaccctcatcctcaccggcaaccccatccagtccctcgccctcggcgccttctccggcctctcctccctccagaagctcgtcgccgtcgagaccaacctcgcctccctcgagaacttccccatcggccacctcaagaccctcaaggagctcaacgtcgcccacaacctcatccagtccttcaagctccccgagtacttctccaacctcaccaacctcgagcacctcgacctctcctccaacaagatccagtccatctactgcaccgacctccgcgtcctccaccagatgcccctcctcaacctctccctcgacctctccctcaaccccatgaacttcatccagcccggcgccttcaaggagatccgcctccacaagctcaccctccgcaacaacttcgactccctcaacgtcatgaagacctgcatccagggcctcgccggcctcgaggtccaccgcctcgtcctcggcgagttccgcaacgagggcaacctcgagaagttcgacaagtccgccctcgagggcctctacaacctcaccatcgaggagttccgcctcgcctacctcgactactacctcgacgacatcatcgacctcttcaactgcctcaccaacgtctcctccttctccctcgtctccgtcaccatcgagcgcgtcaaggacttctcctacaacttcggctggcagcacctcgagctcgtcaactgcaagttcggccagttccccaccctcaagctcaagtccctcaagcgcctcaccttcacctccaacaagggcggcaacgccttctccgaggtcgacctcccctccctcgagttcctcgacctctcccgcaacggcctctccttcaagggctgctgctcccagtccgacttcggcaccacctccctcaagtacctcgacctctccttcaacggcgtcatcaccatgtcctccaacttcctcggcctcgagcagctcgagcacctcgacttccagcactccaacctcaagcagatgtccgagttctccgtcttcctctccctccgcaacctcatctacctcgacatctcccacacccacacccgcgtcgccttcaacggcatcttcaacggcctctcctccctcgaggtcctcaagatggccggcaactccttccaggagaacttcctccccgacatcttcaccgagctccgcaacctcaccttcctcgacctctcccagtgccagctcgagcagctctcccccaccgccttcaactccctctcctccctccaggtcctcaacatgtcccacaacaacttcttctccctcgacaccttcccctacaagtgcctcaactccctccaggtcctcgactactccctcaaccacatcatgacctccaagaagcaggagctccagcacttcccctcctccctcgccttcctcaacctcacccagaacgacttcgcctgcacctgcgagcaccagtccttcctccagtggatcaaggaccagcgccagctcctcgtcgaggtcgagcgcatggagtgcgccaccccctccgacaagcagggcatgcccgtcctctccctcaacatcacctgccagatgaacaagaccatcatcggcgtctccgtcctctccgtcctcgtcgtctccgtcgtcgccgtcctcgtctacaagttctacttccacctcatgctcctcgccggctgcatcaagtacggccgcggcgagaacatctacgacgccttcgtcatctactcctcccaggacgaggactgggtccgcaacgagctcgtcaagaacctcgaggagggcgtcccccccttccagctctgcctccactaccgcgacttcatccccggcgtcgccatcgccgccaacatcatccacgagggcttccacaagtcccgcaaggtcatcgtcgtcgtctcccagcacttcatccagtcccgctggtgcatcttcgagtacgagatcgcccagacctggcagttcctctcctcccgcgccggcatcatcttcatcgtcctccagaaggtcgagaagaccctcctccgccagcaggtcgagctctaccgcctcctctcccgcaacacctacctcgagtgggaggactccgtcctcggccgccacatcttctggcgccgcctccgcaaggccctcctcgacggcaagtcctggaaccccgagggcaccgtcggcaccggctgcaactggcaggaggccacctccatctga

SEQ ID NO: 9596 - RNA, 2520 nt, synthetic construct
  misc_feature 1..2520: note = derived and/or modified sequence opt3 fromTLR4__Homo_sapiens__AAY82270
  source 1..2520: mol_type = other RNA
atgatgagcgcctccagactggctggcaccctcatccccgcaatggccttcctttcttgcgtgaggcctgagtcatgggaaccatgtgtcgaggttgtgccgaacattacataccagtgcatggaactgaatttttataagatacccgacaacttgcctttcagtactaaaaatttagatctgagctttaacccactacggcacctcgggtcctactctttcttttcgttccccgagctgcaagtacttgacctgtcacgctgtgaaatccagacgattgaggatggagcgtatcagagcttgagtcatctctccaccctgatcctgacaggtaatcctattcagtctctcgctttaggcgcctttagcgggctgtcctcacttcaaaagttggtggcagtcgagactaacctggccagtctagaaaatttcccaatcggacacctcaaaaccctgaaggagcttaacgtggctcataatctgatacagagctttaaattgcccgaatacttctctaacctcacaaatctggagcacttagacctgtcctcaaacaagatccagagcatttattgcaccgatctccgagttcttcatcagatgcctctgttgaatctaagtctggacctctctctgaacccaatgaattttatccaaccgggcgcattcaaggagattcgtcttcacaaactgactttgagaaacaactttgattccctcaatgtgatgaagacatgtatccagggtctggccgggttagaagtccacaggctggtgctaggagagttccggaacgaaggcaatctcgagaaattcgacaagagcgctctggaaggcctttacaacttgaccatagaggagtttcgcctggcctatctcgattactacctggacgatattatcgaccttttcaattgcctgacgaacgtatcgtctttttccttggtttcagtgactattgaaagagtcaaagatttcagttataattttgggtggcagcatctcgagctggtgaactgtaagttcggacagtttcccaccttaaagctgaaaagcctaaagaggctcacattcacttccaataaaggtggcaacgcgttttctgaagtggacctgcctagccttgagttcttggacctgtcacggaatgggctcagttttaagggatgctgttcccaaagcgatttcggcaccacatctctgaaatacttagacctgtcatttaacggtgtcatcaccatgagtagcaatttccttgggttggaacagctcgagcacctggatttccagcattccaacctaaagcaaatgtctgagttttcggttttcctgagcctccgcaatctgatctatcttgacatttcccacacgcacactcgagtggcatttaacggaatattcaacggcttgtcaagtctggaagtattaaaaatggccggcaattcttttcaggagaacttcctcccagatatctttacagaactgagaaatcttaccttcctggacttgagccagtgccagctcgagcaactgtcccccactgcttttaactcactaagctctctccaggtgctgaatatgtcccataacaatttctttagtctggatacattcccttacaagtgtcttaacagcttgcaggtcctggactattctttaaatcacattatgacctccaagaaacaggaactccaacattttccatcaagtctggccttccttaacctgacgcagaatgatttcgcatgtacctgcgagcaccagagctttctacagtggatcaaggaccaaaggcagctcctggtggaggttgaacggatggagtgcgctacaccctcggataaacaggggatgccggtgttgtccctgaacataacttgccagatgaataagaccattatcggagtctctgtgttaagcgtactcgttgtgtcagtcgtggccgtcctggtgtacaaattctattttcatcttatgctgttggcgggttgtatcaagtacggccgtggggaaaacatttacgacgccttcgttatctatagttcccaagacgaggattgggtgcgcaatgagctcgtaaagaacctggaagagggagtccctccctttcagctatgcctgcactacagagacttcattccaggcgtggcaatagctgccaacatcattcacgaaggttttcataaatctaggaaggttatcgtggtcgtgagccagcacttcatccaatcccggtggtgtatttttgagtatgaaatagctcagacatggcagttcctttcaagccgagccgggatcatttttatcgtactccagaaagtggagaagactctgttgcgccaacaggttgagctgtacagattactcagtaggaatacctatctggaatgggaggattctgtccttggccggcatattttctggcgcagactgaggaaagcattgctcgacggaaagtcctggaaccctgaaggcacagtggggaccggatgcaattggcaggaggccactagcatctga

SEQ ID NO: 9597 - RNA, 2520 nt, synthetic construct
  misc_feature 1..2520: note = derived and/or modified sequence opt4 fromTLR4__Homo_sapiens__AAY82270
  source 1..2520: mol_type = other RNA
atgatgagcgccagcagactggccggcaccctgatccccgccatggccttcctgagctgcgtgagacccgagagctgggagccctgcgtggaggtggtgcccaacatcacctaccagtgcatggagctgaacttctacaagatccccgacaacctgcccttcagcaccaagaacctggacctgagcttcaaccccctgagacacctgggcagctacagcttcttcagcttccccgagctgcaggtgctggacctgagcagatgcgagatccagaccatcgaggacggcgcctaccagagcctgagccacctgagcaccctgatcctgaccggcaaccccatccagagcctggccctgggcgccttcagcggcctgagcagcctgcagaagctggtggccgtggagaccaacctggccagcctggagaacttccccatcggccacctgaagaccctgaaggagctgaacgtggcccacaacctgatccagagcttcaagctgcccgagtacttcagcaacctgaccaacctggagcacctggacctgagcagcaacaagatccagagcatctactgcaccgacctgagagtgctgcaccagatgcccctgctgaacctgagcctggacctgagcctgaaccccatgaacttcatccagcccggcgccttcaaggagatcagactgcacaagctgaccctgagaaacaacttcgacagcctgaacgtgatgaagacctgcatccagggcctggccggcctggaggtgcacagactggtgctgggcgagttcagaaacgagggcaacctggagaagttcgacaagagcgccctggagggcctgtacaacctgaccatcgaggagttcagactggcctacctggactactacctggacgacatcatcgacctgttcaactgcctgaccaacgtgagcagcttcagcctggtgagcgtgaccatcgagagagtgaaggacttcagctacaacttcggctggcagcacctggagctggtgaactgcaagttcggccagttccccaccctgaagctgaagagcctgaagagactgaccttcaccagcaacaagggcggcaacgccttcagcgaggtggacctgcccagcctggagttcctggacctgagcagaaacggcctgagcttcaagggctgctgcagccagagcgacttcggcaccaccagcctgaagtacctggacctgagcttcaacggcgtgatcaccatgagcagcaacttcctgggcctggagcagctggagcacctggacttccagcacagcaacctgaagcagatgagcgagttcagcgtgttcctgagcctgagaaacctgatctacctggacatcagccacacccacaccagagtggccttcaacggcatcttcaacggcctgagcagcctggaggtgctgaagatggccggcaacagcttccaggagaacttcctgcccgacatcttcaccgagctgagaaacctgaccttcctggacctgagccagtgccagctggagcagctgagccccaccgccttcaacagcctgagcagcctgcaggtgctgaacatgagccacaacaacttcttcagcctggacaccttcccctacaagtgcctgaacagcctgcaggtgctggactacagcctgaaccacatcatgaccagcaagaagcaggagctgcagcacttccccagcagcctggccttcctgaacctgacccagaacgacttcgcctgcacctgcgagcaccagagcttcctgcagtggatcaaggaccagagacagctgctggtggaggtggagagaatggagtgcgccacccccagcgacaagcagggcatgcccgtgctgagcctgaacatcacctgccagatgaacaagaccatcatcggcgtgagcgtgctgagcgtgctggtggtgagcgtggtggccgtgctggtgtacaagttctacttccacctgatgctgctggccggctgcatcaagtacggcagaggcgagaacatctacgacgccttcgtgatctacagcagccaggacgaggactgggtgagaaacgagctggtgaagaacctggaggagggcgtgccccccttccagctgtgcctgcactacagagacttcatccccggcgtggccatcgccgccaacatcatccacgagggcttccacaagagcagaaaggtgatcgtggtggtgagccagcacttcatccagagcagatggtgcatcttcgagtacgagatcgcccagacctggcagttcctgagcagcagagccggcatcatcttcatcgtgctgcagaaggtggagaagaccctgctgagacagcaggtggagctgtacagactgctgagcagaaacacctacctggagtgggaggacagcgtgctgggcagacacatcttctggagaagactgagaaaggccctgctggacggcaagagctggaaccccgagggcaccgtgggcaccggctgcaactggcaggaggccaccagcatctga

SEQ ID NO: 9598 - RNA, 2520 nt, synthetic construct
  misc_feature 1..2520: note = derived and/or modified sequence opt5 fromTLR4__Homo_sapiens__AAY82270
  source 1..2520: mol_type = other RNA
atgatgagcgcctccagactggctggcaccctcatccccgccatggcgttcctgtcttgcgtgcggcctgagagctgggaaccgtgtgtcgaggttgtgcccaacattacataccagtgcatggaacttaatttttataagatccctgacaacctgcccttctccacgaaaaatctcgatctgtcttttaaccctcttcgccacctggggagctactccttcttttctttccccgagctccaagtgctggacctgagcagatgtgaaattcagaccatcgaggatggagcttatcagtccctcagccatctgtctacacttattctgaccggcaatcctatccagtccctcgccctgggggcctttagcggactttcttccctgcaaaagctcgtcgctgtggagacaaacctggccagcctggaaaatttcccgatcggccacctcaaaaccctgaaggagcttaacgttgctcataatctgattcagtcttttaaactccccgaatacttctccaacctgacaaatcttgagcacctggacctcagctccaacaagatccagtctatttattgcaccgatctgcgggtgctgcatcagatgcctctcctgaatcttagcctggacctctccctgaaccccatgaattttatccaacctggggccttcaaggagattcgccttcacaaactgacgctcagaaacaactttgatagcctgaatgtcatgaagacctgtatccagggactggcgggcctcgaagtgcaccggctggttcttggcgagttccgcaacgaagggaatctggagaaattcgacaagtctgccctcgaaggactgtacaacctgacaattgaggagtttagacttgcttatctcgattactacctggacgatatcatcgacctgttcaattgcctcaccaacgtgtccagcttttctctggtcagcgtgacaattgaacgggtgaaagatttctcctataattttggctggcagcatcttgagctggtcaactgtaagttcgggcagtttcccaccctcaagctgaaatctctgaagcgccttacgttcacaagcaataaaggaggcaacgccttttccgaagttgacctcccgagcctggagttcctggacctctctagaaatgggctgtcctttaagggatgctgtagccaatctgatttcggcaccacatcccttaaatacctggacctcagctttaacggcgtgatcaccatgtcctctaatttcctggggctggaacagcttgagcacctcgatttccagcatagcaacctgaagcaaatgtccgagttttctgtgttcctgagcctccggaatctgatttatcttgacatctcccacacccacacacgcgtcgcttttaacggaattttcaacggcctgagctctctcgaagtgctgaaaatggccggaaattcctttcaggagaacttcctgcctgatatctttacggaacttagaaatctcaccttcctggacctgagccagtgccagctcgagcaactgtctcccacagcgtttaactcccttagctctctgcaggttctcaatatgagccataacaatttcttttccctggataccttcccttacaagtgtctgaacagccttcaggtgctggactattctctcaatcacatcatgacatccaagaaacaggaactgcaacattttcccagctccctcgccttcctgaaccttacccagaatgatttcgcttgcacgtgcgagcaccagtcttttctgcagtggattaaggaccaacggcagctcctggtcgaggtggaacgcatggagtgtgccacacccagcgataaacaggggatgcctgttctgtcccttaacattacctgccagatgaataagaccatcatcggcgtgtctgtcctgagcgtgctcgtcgtgtccgttgtggctgtcctggtgtacaaattctattttcatctcatgctgcttgccgggtgtattaagtacggaagaggcgaaaacatctacgacgccttcgttatctattctagccaagacgaggattgggtgcggaatgagctggtcaagaacctcgaagagggcgtgccgccctttcagctgtgcctgcactacagagacttcattcctggggtggctatcgcggccaacattatccacgaaggatttcataaatcccgcaaggttattgtcgtggtgagccagcacttcatccaatctcggtggtgtatttttgagtatgaaatcgctcagacatggcagttcctttccagcagagccggcatcatttttatcgtcctgcagaaagtggagaagaccctcctgcgccaacaggttgagctctaccggctgctttctagaaatacatatctggaatgggaggattccgtgctggggcgccatattttctggcggagactccgcaaagccctgcttgacggaaagagctggaaccccgaaggcacggtcgggaccggctgcaattggcaggaggctacatctatctga

SEQ ID NO: 9599 - protein, 839 aa, synthetic construct
  REGION 1..839: note = TLR4__Homo_sapiens__O00206
MMSASRLAGTLIPAMAFLSCVRPESWEPCVEVVPNITYQCMELNFYKIPDNLPFSTKNLDLSFNPLRHLGSYSFFSFPELQVLDLSRCEIQTIEDGAYQSLSHLSTLILTGNPIQSLALGAFSGLSSLQKLVAVETNLASLENFPIGHLKTLKELNVAHNLIQSFKLPEYFSNLTNLEHLDLSSNKIQSIYCTDLRVLHQMPLLNLSLDLSLNPMNFIQPGAFKEIRLHKLTLRNNFDSLNVMKTCIQGLAGLEVHRLVLGEFRNEGNLEKFDKSALEGLCNLTIEEFRLAYLDYYLDDIIDLFNCLTNVSSFSLVSVTIERVKDFSYNFGWQHLELVNCKFGQFPTLKLKSLKRLTFTSNKGGNAFSEVDLPSLEFLDLSRNGLSFKGCCSQSDFGTTSLKYLDLSFNGVITMSSNFLGLEQLEHLDFQHSNLKQMSEFSVFLSLRNLIYLDISHTHTRVAFNGIFNGLSSLEVLKMAGNSFQENFLPDIFTELRNLTFLDLSQCQLEQLSPTAFNSLSSLQVLNMSHNNFFSLDTFPYKCLNSLQVLDYSLNHIMTSKKQELQHFPSSLAFLNLTQNDFACTCEHQSFLQWIKDQRQLLVEVERMECATPSDKQGMPVLSLNITCQMNKTIIGVSVLSVLVVSVVAVLVYKFYFHLMLLAGCIKYGRGENIYDAFVIYSSQDEDWVRNELVKNLEEGVPPFQLCLHYRDFIPGVAIAANIIHEGFHKSRKVIVVVSQHFIQSRWCIFEYEIAQTWQFLSSRAGIIFIVLQKVEKTLLRQQVELYRLLSRNTYLEWEDSVLGRHIFWRRLRKALLDGKSWNPEGTVGTGCNWQEATSI

SEQ ID NO: 9600 - RNA, 2520 nt, synthetic construct
  misc_feature 1..2520: note = TLR4__Homo_sapiens__AAC80227
  source 1..2520: mol_type = other RNA
atgatgtctgcctcgcgcctggctgggactctgatcccagccatggccttcctctcctgcgtgagaccagaaagctgggagccctgcgtggaggtggttcctaatattacttatcaatgcatggagctgaatttctacaaaatccccgacaacctccccttctcaaccaagaacctggacctgagctttaatcccctgaggcatttaggcagctatagcttcttcagtttcccagaactgcaggtgctggatttatccaggtgtgaaatccagacaattgaagatggggcatatcagagcctaagccacctctctaccttaatattgacaggaaaccccatccagagtttagccctgggagccttttctggactatcaagtttacagaagctggtggctgtggagacaaatctagcatctctagagaacttccccattggacatctcaaaactttgaaagaacttaatgtggctcacaatcttatccaatctttcaaattacctgagtatttttctaatctgaccaatctagagcacttggacctttccagcaacaagattcaaagtatttattgcacagacttgcgggttctacatcaaatgcccctactcaatctctctttagacctgtccctgaatcctatgaactttatccaaccaggtgcatttaaagaaattaggcttcataagctgactttaagaaataattttgatagtttaaatgtaatgaaaacttgtattcaaggtctggctggtttagaagtccatcgtttggttctgggagaatttagaaatgaaggaaacttggaaaagtttgacaaatctgctctagagggcctgtgcaatttgaccattgaagaattccgattagcatacttagactactacctcgatgatattattgacttatttaattgtttgacaaatgtttcttcattttccctggtgagtgtgactattgaaagggtaaaagacttttcttataatttcggatggcaacatttagaattagttaactgtaaatttggacagtttcccacattgaaactcaaatctctcaaaaggcttactttcacttccaacaaaggtgggaatgctttttcagaagttgatctaccaagccttgagtttctagatctcagtagaaatggcttgagtttcaaaggttgctgttctcaaagtgattttgggacaaccagcctaaagtatttagatctgagcttcaatggtgttattaccatgagttcaaacttcttgggcttagaacaactagaacatctggatttccagcattccaatttgaaacaaatgagtgagttttcagtattcctatcactcagaaacctcatttaccttgacatttctcatactcacaccagagttgctttcaatggcatcttcaatggcttgtccagtctcgaagtcttgaaaatggctggcaattctttccaggaaaacttccttccagatatcttcacagagctgagaaacttgaccttcctggacctctctcagtgtcaactggagcagttgtctccaacagcatttaactcactctccagtcttcaggtactaaatatgagccacaacaacttcttttcattggatacgtttccttataagtgtctgaactccctccaggttcttgattacagtctcaatcacataatgacttccaaaaaacaggaactacagcattttccaagtagtctagctttcttaaatcttactcagaatgactttgcttgtacttgtgaacaccagagtttcctgcaatggatcaaggaccagaggcagctcttggtggaagttgaacgaatggaatgtgcaacaccttcagataagcagggcatgcctgtgctgagtttgaatatcacctgtcagatgaataagaccatcattggtgtgtcggtcctcagtgtgcttgtagtatctgttgtagcagttctggtctataagttctattttcacctgatgcttcttgctggctgcataaagtatggtagaggtgaaaacatctatgatgcctttgttatctactcaagccaggatgaggactgggtaaggaatgagctagtaaagaatttagaagaaggggtgcctccatttcagctctgccttcactacagagactttattcccggtgtggccattgctgccaacatcatccatgaaggtttccataaaagccgaaaggtgattgttgtggtgtcccagcacttcatccagagccgctggtgtatctttgaatatgagattgctcagacctggcagtttctgagcagtcgtgctggtatcatcttcattgtcctgcagaaggtggagaagaccctgctcaggcagcaggtggagctgtaccgccttctcagcaggaacacttacctggagtgggaggacagtgtcctggggcggcacatcttctggagacgactcagaaaagccctgctggatggtaaatcatggaatccagaaggaacagtgggtacaggatgcaattggcaggaagcaacatctatctga

SEQ ID NO: 9601 - RNA, 2520 nt, synthetic construct
  misc_feature 1..2520: note = derived and/or modified sequence opt1 fromTLR4__Homo_sapiens__AAC80227
  source 1..2520: mol_type = other RNA
atgatgagcgcctcccgcctggccggcaccctcatccccgcgatggccttcctgagctgcgtgcggccggagtcctgggagccctgcgtcgaggtggtgcccaacatcacctaccagtgcatggagctgaacttctacaagatccccgacaacctcccgttcagcacgaagaacctggacctgtccttcaaccccctccgccacctggggagctactccttcttcagcttccccgagctgcaggtcctcgacctgtcccggtgcgagatccagaccatcgaggacggcgcctaccagagcctgtcccacctcagcaccctgatcctgaccgggaaccccatccagtccctcgccctgggcgccttcagcgggctgtccagcctccagaagctggtggcggtggagacgaacctggcctccctcgagaacttcccgatcggccacctgaagaccctgaaggagctcaacgtcgcccacaacctgatccagagcttcaagctgcccgagtacttctccaacctcaccaacctggagcacctggacctcagcagcaacaagatccagtccatctactgcaccgacctgcgcgtgctgcaccagatgcccctcctgaacctgagcctcgacctgtccctgaaccccatgaacttcatccagccgggcgccttcaaggagatccggctccacaagctgacgctgcgcaacaacttcgacagcctcaacgtgatgaagacctgcatccaggggctggcgggcctggaggtccaccggctcgtgctgggggagttccgcaacgagggcaacctggagaagttcgacaagtccgccctcgaggggctgtgcaacctgaccatcgaggagttccggctggcctacctcgactactacctggacgacatcatcgacctgttcaactgcctcaccaacgtgagctccttcagcctggtctccgtgacgatcgagcgcgtgaaggacttcagctacaacttcggctggcagcacctggagctcgtcaactgcaagttcggccagttccccaccctgaagctgaagtccctcaagcggctgaccttcaccagcaacaagggcgggaacgccttctccgaggtggacctgcccagcctcgagttcctggacctgtcccgcaacgggctcagcttcaagggctgctgctcccagagcgacttcggcacgacctccctgaagtacctggacctcagcttcaacggggtgatcaccatgagctccaacttcctgggcctggagcagctcgagcacctggacttccagcacagcaacctgaagcagatgtccgagttcagcgtcttcctctccctgcggaacctgatctacctcgacatcagccacacccacacgcgcgtggccttcaacgggatcttcaacggcctgtccagcctggaggtgctcaagatggcggggaactccttccaggagaacttcctgcccgacatcttcaccgagctgcggaacctcaccttcctggacctgagccagtgccagctcgagcagctgtccccgaccgccttcaacagcctgtccagcctccaggtcctgaacatgtcccacaacaacttcttcagcctggacacgttcccctacaagtgcctcaactccctccaggtgctggactacagcctgaaccacatcatgaccagcaagaagcaggagctgcagcacttcccctccagcctggccttcctcaacctgacccagaacgacttcgcctgcacgtgcgagcaccagtccttcctgcagtggatcaaggaccagcgccagctcctggtggaggtcgagcggatggagtgcgccacccccagcgacaagcagggcatgccggtgctgtccctcaacatcacgtgccagatgaacaagaccatcatcggcgtcagcgtgctgtccgtgctggtcgtgagcgtggtcgcggtgctcgtgtacaagttctacttccacctgatgctgctcgccgggtgcatcaagtacggccgcggggagaacatctacgacgccttcgtcatctactccagccaggacgaggactgggtgcggaacgagctggtgaagaacctggaggagggcgtcccgcccttccagctctgcctgcactaccgcgacttcatccccggggtggccatcgccgcgaacatcatccacgagggcttccacaagtcccggaaggtgatcgtcgtggtgagccagcacttcatccagtcccgctggtgcatcttcgagtacgagatcgcccagacctggcagttcctgagctcccgcgccggcatcatcttcatcgtcctccagaaggtggagaagaccctgctgcggcagcaggtcgagctctaccgcctgctgagccggaacacctacctcgagtgggaggactccgtgctggggcgccacatcttctggcggcgcctgcggaaggccctcctggacggcaagagctggaaccccgaggggaccgtgggcaccgggtgcaactggcaggaggccacgtccatctga

SEQ ID NO: 9602 - RNA, 2520 nt, synthetic construct
  misc_feature 1..2520: note = derived and/or modified sequence opt2 fromTLR4__Homo_sapiens__AAC80227
  source 1..2520: mol_type = other RNA
atgatgtccgcctcccgcctcgccggcaccctcatccccgccatggccttcctctcctgcgtccgccccgagtcctgggagccctgcgtcgaggtcgtccccaacatcacctaccagtgcatggagctcaacttctacaagatccccgacaacctccccttctccaccaagaacctcgacctctccttcaaccccctccgccacctcggctcctactccttcttctccttccccgagctccaggtcctcgacctctcccgctgcgagatccagaccatcgaggacggcgcctaccagtccctctcccacctctccaccctcatcctcaccggcaaccccatccagtccctcgccctcggcgccttctccggcctctcctccctccagaagctcgtcgccgtcgagaccaacctcgcctccctcgagaacttccccatcggccacctcaagaccctcaaggagctcaacgtcgcccacaacctcatccagtccttcaagctccccgagtacttctccaacctcaccaacctcgagcacctcgacctctcctccaacaagatccagtccatctactgcaccgacctccgcgtcctccaccagatgcccctcctcaacctctccctcgacctctccctcaaccccatgaacttcatccagcccggcgccttcaaggagatccgcctccacaagctcaccctccgcaacaacttcgactccctcaacgtcatgaagacctgcatccagggcctcgccggcctcgaggtccaccgcctcgtcctcggcgagttccgcaacgagggcaacctcgagaagttcgacaagtccgccctcgagggcctctgcaacctcaccatcgaggagttccgcctcgcctacctcgactactacctcgacgacatcatcgacctcttcaactgcctcaccaacgtctcctccttctccctcgtctccgtcaccatcgagcgcgtcaaggacttctcctacaacttcggctggcagcacctcgagctcgtcaactgcaagttcggccagttccccaccctcaagctcaagtccctcaagcgcctcaccttcacctccaacaagggcggcaacgccttctccgaggtcgacctcccctccctcgagttcctcgacctctcccgcaacggcctctccttcaagggctgctgctcccagtccgacttcggcaccacctccctcaagtacctcgacctctccttcaacggcgtcatcaccatgtcctccaacttcctcggcctcgagcagctcgagcacctcgacttccagcactccaacctcaagcagatgtccgagttctccgtcttcctctccctccgcaacctcatctacctcgacatctcccacacccacacccgcgtcgccttcaacggcatcttcaacggcctctcctccctcgaggtcctcaagatggccggcaactccttccaggagaacttcctccccgacatcttcaccgagctccgcaacctcaccttcctcgacctctcccagtgccagctcgagcagctctcccccaccgccttcaactccctctcctccctccaggtcctcaacatgtcccacaacaacttcttctccctcgacaccttcccctacaagtgcctcaactccctccaggtcctcgactactccctcaaccacatcatgacctccaagaagcaggagctccagcacttcccctcctccctcgccttcctcaacctcacccagaacgacttcgcctgcacctgcgagcaccagtccttcctccagtggatcaaggaccagcgccagctcctcgtcgaggtcgagcgcatggagtgcgccaccccctccgacaagcagggcatgcccgtcctctccctcaacatcacctgccagatgaacaagaccatcatcggcgtctccgtcctctccgtcctcgtcgtctccgtcgtcgccgtcctcgtctacaagttctacttccacctcatgctcctcgccggctgcatcaagtacggccgcggcgagaacatctacgacgccttcgtcatctactcctcccaggacgaggactgggtccgcaacgagctcgtcaagaacctcgaggagggcgtcccccccttccagctctgcctccactaccgcgacttcatccccggcgtcgccatcgccgccaacatcatccacgagggcttccacaagtcccgcaaggtcatcgtcgtcgtctcccagcacttcatccagtcccgctggtgcatcttcgagtacgagatcgcccagacctggcagttcctctcctcccgcgccggcatcatcttcatcgtcctccagaaggtcgagaagaccctcctccgccagcaggtcgagctctaccgcctcctctcccgcaacacctacctcgagtgggaggactccgtcctcggccgccacatcttctggcgccgcctccgcaaggccctcctcgacggcaagtcctggaaccccgagggcaccgtcggcaccggctgcaactggcaggaggccacctccatctga

SEQ ID NO: 9603 - RNA, 2520 nt, synthetic construct
  misc_feature 1..2520: note = derived and/or modified sequence opt3 fromTLR4__Homo_sapiens__AAC80227
  source 1..2520: mol_type = other RNA
atgatgagcgcctccagactggctggcaccctcatccccgcaatggccttcctttcttgcgtgaggcctgagtcatgggaaccatgtgtcgaggttgtgccgaacattacataccagtgcatggaactgaatttttataagatacccgacaacttgcctttcagtactaaaaatttagatctgagctttaacccactacggcacctcgggtcctactctttcttttcgttccccgagctgcaagtacttgacctgtcacgctgtgaaatccagacgattgaggatggagcgtatcagagcttgagtcatctctccaccctgatcctgacaggtaatcctattcagtctctcgctttaggcgcctttagcgggctgtcctcacttcaaaagttggtggcagtcgagactaacctggccagtctagaaaatttcccaatcggacacctcaaaaccctgaaggagcttaacgtggctcataatctgatacagagctttaaattgcccgaatacttctctaacctcacaaatctggagcacttagacctgtcctcaaacaagatccagagcatttattgcaccgatctccgagttcttcatcagatgcctctgttgaatctaagtctggacctctctctgaacccaatgaattttatccaaccgggcgcattcaaggagattcgtcttcacaaactgactttgagaaacaactttgattccctcaatgtgatgaagacatgtatccagggtctggccgggttagaagtccacaggctggtgctaggagagttccggaacgaaggcaatctcgagaaattcgacaagagcgctctggaaggcctttgcaacttgaccatagaggagtttcgcctggcctacctcgattattacctggacgatattatcgaccttttcaattgtctgacgaacgtatcgtctttttccttggtttcagtgactattgaaagagtcaaagatttcagttacaattttgggtggcagcatctcgagctggtgaactgcaagttcggacagtttcccaccttaaagctgaaaagcctaaagaggctcacattcacttccaataaaggtggcaacgcgttttctgaagtggacctgcctagccttgagttcttggacctgtcacggaatgggctcagttttaagggatgttgctcccaaagcgatttcggcaccacatctctgaaatatttagacctgtcatttaacggtgtcatcaccatgagtagcaatttccttgggttggaacagctcgagcacctggatttccagcattccaacctaaagcaaatgtctgagttttcggttttcctgagcctccgcaatctgatctaccttgacatttcccacacgcacactcgagtggcatttaacggaatattcaacggcttgtcaagtctggaagtattaaaaatggccggcaattcttttcaggagaacttcctcccagatatctttacagaactgagaaatcttaccttcctggacttgagccagtgtcagctcgagcaactgtcccccactgcttttaactcactaagctctctccaggtgctgaatatgtcccataacaatttctttagtctggatacattcccttataagtgccttaacagcttgcaggtcctggactactctttaaatcacattatgacctccaagaaacaggaactccaacattttccatcaagtctggccttccttaacctgacgcagaatgatttcgcatgcacctgtgagcaccagagctttctacagtggatcaaggaccaaaggcagctcctggtggaggttgaacggatggagtgcgctacaccctcggataaacaggggatgccggtgttgtccctgaacataacttgtcagatgaataagaccattatcggagtctctgtgttaagcgtactcgttgtgtcagtcgtggccgtcctggtgtataaattctactttcatcttatgctgttggcgggttgcatcaagtatggccgtggggaaaacatttacgacgccttcgttatctacagttcccaagacgaggattgggtgcgcaatgagctcgtaaagaacctggaagagggagtccctccctttcagctatgtctgcactatagagacttcattccaggcgtggcaatagctgccaacatcattcacgaaggttttcataaatctaggaaggttatcgtggtcgtgagccagcacttcatccaatcccggtggtgcatttttgagtacgaaatagctcagacatggcagttcctttcaagccgagccgggatcatttttatcgtactccagaaagtggagaagactctgttgcgccaacaggttgagctgtatagattactcagtaggaatacctacctggaatgggaggattctgtccttggccggcatattttctggcgcagactgaggaaagcattgctcgacggaaagtcctggaaccctgaaggcacagtggggaccggatgtaattggcaggaggccactagcatctga

SEQ ID NO: 9604 - RNA, 2520 nt, synthetic construct
  misc_feature 1..2520: note = derived and/or modified sequence opt4 fromTLR4__Homo_sapiens__AAC80227
  source 1..2520: mol_type = other RNA
atgatgagcgccagcagactggccggcaccctgatccccgccatggccttcctgagctgcgtgagacccgagagctgggagccctgcgtggaggtggtgcccaacatcacctaccagtgcatggagctgaacttctacaagatccccgacaacctgcccttcagcaccaagaacctggacctgagcttcaaccccctgagacacctgggcagctacagcttcttcagcttccccgagctgcaggtgctggacctgagcagatgcgagatccagaccatcgaggacggcgcctaccagagcctgagccacctgagcaccctgatcctgaccggcaaccccatccagagcctggccctgggcgccttcagcggcctgagcagcctgcagaagctggtggccgtggagaccaacctggccagcctggagaacttccccatcggccacctgaagaccctgaaggagctgaacgtggcccacaacctgatccagagcttcaagctgcccgagtacttcagcaacctgaccaacctggagcacctggacctgagcagcaacaagatccagagcatctactgcaccgacctgagagtgctgcaccagatgcccctgctgaacctgagcctggacctgagcctgaaccccatgaacttcatccagcccggcgccttcaaggagatcagactgcacaagctgaccctgagaaacaacttcgacagcctgaacgtgatgaagacctgcatccagggcctggccggcctggaggtgcacagactggtgctgggcgagttcagaaacgagggcaacctggagaagttcgacaagagcgccctggagggcctgtgcaacctgaccatcgaggagttcagactggcctacctggactactacctggacgacatcatcgacctgttcaactgcctgaccaacgtgagcagcttcagcctggtgagcgtgaccatcgagagagtgaaggacttcagctacaacttcggctggcagcacctggagctggtgaactgcaagttcggccagttccccaccctgaagctgaagagcctgaagagactgaccttcaccagcaacaagggcggcaacgccttcagcgaggtggacctgcccagcctggagttcctggacctgagcagaaacggcctgagcttcaagggctgctgcagccagagcgacttcggcaccaccagcctgaagtacctggacctgagcttcaacggcgtgatcaccatgagcagcaacttcctgggcctggagcagctggagcacctggacttccagcacagcaacctgaagcagatgagcgagttcagcgtgttcctgagcctgagaaacctgatctacctggacatcagccacacccacaccagagtggccttcaacggcatcttcaacggcctgagcagcctggaggtgctgaagatggccggcaacagcttccaggagaacttcctgcccgacatcttcaccgagctgagaaacctgaccttcctggacctgagccagtgccagctggagcagctgagccccaccgccttcaacagcctgagcagcctgcaggtgctgaacatgagccacaacaacttcttcagcctggacaccttcccctacaagtgcctgaacagcctgcaggtgctggactacagcctgaaccacatcatgaccagcaagaagcaggagctgcagcacttccccagcagcctggccttcctgaacctgacccagaacgacttcgcctgcacctgcgagcaccagagcttcctgcagtggatcaaggaccagagacagctgctggtggaggtggagagaatggagtgcgccacccccagcgacaagcagggcatgcccgtgctgagcctgaacatcacctgccagatgaacaagaccatcatcggcgtgagcgtgctgagcgtgctggtggtgagcgtggtggccgtgctggtgtacaagttctacttccacctgatgctgctggccggctgcatcaagtacggcagaggcgagaacatctacgacgccttcgtgatctacagcagccaggacgaggactgggtgagaaacgagctggtgaagaacctggaggagggcgtgccccccttccagctgtgcctgcactacagagacttcatccccggcgtggccatcgccgccaacatcatccacgagggcttccacaagagcagaaaggtgatcgtggtggtgagccagcacttcatccagagcagatggtgcatcttcgagtacgagatcgcccagacctggcagttcctgagcagcagagccggcatcatcttcatcgtgctgcagaaggtggagaagaccctgctgagacagcaggtggagctgtacagactgctgagcagaaacacctacctggagtgggaggacagcgtgctgggcagacacatcttctggagaagactgagaaaggccctgctggacggcaagagctggaaccccgagggcaccgtgggcaccggctgcaactggcaggaggccaccagcatctga

SEQ ID NO: 9605 - RNA, 2520 nt, synthetic construct
  misc_feature 1..2520: note = derived and/or modified sequence opt5 fromTLR4__Homo_sapiens__AAC80227
  source 1..2520: mol_type = other RNA
atgatgagcgcctccagactggctggcaccctcatccccgccatggcgttcctgtcttgcgtgcggcctgagagctgggaaccgtgtgtcgaggttgtgcccaacattacataccagtgcatggaacttaatttttataagatccctgacaacctgcccttctccacgaaaaatctcgatctgtcttttaaccctcttcgccacctggggagctactccttcttttctttccccgagctccaagtgctggacctgagcagatgtgaaattcagaccatcgaggatggagcttatcagtccctcagccatctgtctacacttattctgaccggcaatcctatccagtccctcgccctgggggcctttagcggactttcttccctgcaaaagctcgtcgctgtggagacaaacctggccagcctggaaaatttcccgatcggccacctcaaaaccctgaaggagcttaacgttgctcataatctgattcagtcttttaaactccccgaatacttctccaacctgacaaatcttgagcacctggacctcagctccaacaagatccagtctatttattgcaccgatctgcgggtgctgcatcagatgcctctcctgaatcttagcctggacctctccctgaaccccatgaattttatccaacctggggccttcaaggagattcgccttcacaaactgacgctcagaaacaactttgatagcctgaatgtcatgaagacctgtatccagggactggcgggcctcgaagtgcaccggctggttcttggcgagttccgcaacgaagggaatctggagaaattcgacaagtctgccctcgaaggactgtgcaacctgacaattgaggagtttagacttgcttacctcgattattacctggacgatatcatcgacctgttcaattgtctcaccaacgtgtccagcttttctctggtcagcgtgacaattgaacgggtgaaagatttctcctacaattttggctggcagcatcttgagctggtcaactgcaagttcgggcagtttcccaccctcaagctgaaatctctgaagcgccttacgttcacaagcaataaaggaggcaacgccttttccgaagttgacctcccgagcctggagttcctggacctctctagaaatgggctgtcctttaagggatgttgcagccaatctgatttcggcaccacatcccttaaatatctggacctcagctttaacggcgtgatcaccatgtcctctaatttcctggggctggaacagcttgagcacctcgatttccagcatagcaacctgaagcaaatgtccgagttttctgtgttcctgagcctccggaatctgatttaccttgacatctcccacacccacacacgcgtcgcttttaacggaattttcaacggcctgagctctctcgaagtgctgaaaatggccggaaattcctttcaggagaacttcctgcctgatatctttacggaacttagaaatctcaccttcctggacctgagccagtgtcagctcgagcaactgtctcccacagcgtttaactcccttagctctctgcaggttctcaatatgagccataacaatttcttttccctggataccttcccttataagtgcctgaacagccttcaggtgctggactactctctcaatcacatcatgacatccaagaaacaggaactgcaacattttcccagctccctcgccttcctgaaccttacccagaatgatttcgcttgcacgtgtgagcaccagtcttttctgcagtggattaaggaccaacggcagctcctggtcgaggtggaacgcatggagtgcgccacacccagcgataaacaggggatgcctgttctgtcccttaacatcacctgtcagatgaataagaccattatcggcgtgtctgtcctgagcgtgctcgtcgtgtccgttgtggctgtcctggtgtataaattctactttcatctcatgctgcttgccgggtgcattaagtatggaagaggcgaaaacatctacgacgccttcgttatctactctagccaagacgaggattgggtgcggaatgagctggtcaagaacctcgaagagggcgtgccgccctttcagctgtgtctgcactatagagacttcattcctggggtggctatcgcggccaacattatccacgaaggatttcataaatcccgcaaggttattgtcgtggtgagccagcacttcatccaatctcggtggtgcatttttgagtacgaaatcgctcagacatggcagttcctttccagcagagccggcatcatttttatcgtcctgcagaaagtggagaagaccctcctgcgccaacaggttgagctctatcggctgctttctagaaatacatacctggaatgggaggattccgtgctggggcgccatattttctggcggagactccgcaaagccctgcttgacggaaagagctggaaccccgaaggcacggtcgggaccggctgtaattggcaggaggctacatctatctga

SEQ ID NO: 9606 - protein, 858 aa, synthetic construct [sequence omitted]

SEQ ID NO: 9607 - RNA, 2577 nt, synthetic construct
  misc_feature 1..2577: note = TLR5__Homo_sapiens__AAZ17462
  source 1..2577: mol_type = other RNA
atgggagaccacctggaccttctcctaggagtggtgctcatggccggtcctgtgtttggaattccttcctgctcctttgatggccgaatagccttttatcgtttctgcaacctcacccaggtcccccaggtcctcaacaccactgagaggctcctgctgagcttcaactatatcaggacagtcactgcttcatccttcccctttctggaacagctgcagctgctggagctcgggagccagtatacccccttgactattgacaaggaggccttcagaaacctgcccaaccttagaatcttggacctgggaagtagtaagatatacttcttgcatccagatgcttttcagggactgttccatctgtttgaacttagactgtatttctgtggtctctctgatgctgtattgaaagatggttatttcagaaatttaaaggctttaactcgcttggatctatccaaaaatcagattcgtagcctttaccttcatccttcatttgggaagttgaattccttaaagtccatagatttttcctccaaccaaatattccttgtatgtgaacatgagctcgagcccctacaagggaaaacgctctccttttttagcctcgcagctaatagcttgtatagcagagtctcagtggactggggaaaatgtatgaacccattcagaaacatggtgctggagatactagatgtttctggaaatggctggacagtggacatcacaggaaactttagcaatgccatcagcaaaagccaggccttctctttgattcttgcccaccacatcatgggtgccgggtttggcttccataacatcaaagatcctgaccagaacacatttgctggcctggccagaagttcagtgagacacctggatctttcacatgggtttgtcttctccctgaactcacgagtctttgagacactcaaggatttgaaggttctgaaccttgcctacaacaagataaataagattgcagatgaagcattttacggacttgacaacctccaagttctcaatttgtcatataaccttctgggggaactttacagttcgaatttctatggactacctaaggtagcctacattgatttgcaaaagaatcacattgcaataattcaagaccaaacattcaaattcctggaaaaattacagaccttggatctccgagacaatgctcttacaaccattcattttattccaagcatacccgatatcttcttgagtggcaataaactagtgactttgccaaagatcaaccttacagcgaacctcatccacttatcagaaaacaggctagaaaatctagatattctctactttctcctacgggtacctcatctccagattctcattttaaatcaaaatcgcttctcctcctgtagtggagatcaaaccccttcagagaatcccagcttagaacagcttttccttggagaaaatatgttgcaacttgcctgggaaactgagctctgttgggatgtttttgagggactttctcatcttcaagttctgtatttgaatcataactatcttaattcccttccaccaggagtatttagccatctgactgcattaaggggactaagcctcaactccaacaggctgacagttctttctcacaatgatttacctgctaatttagagatcctggacatatccaggaaccagctcctagctcctaatcctgatgtatttgtatcacttagtgtcttggatataactcataacaagttcatttgtgaatgtgaacttagcacttttatcaattggcttaatcacaccaatgtcactatagctgggcctcctgcagacatatattgtgtgtaccctgactcgctctctggggtttccctcttctctctttccacggaaggttgtgatgaagaggaagtcttaaagtccctaaagttctcccttttctttgtatgcactgtcactctgactctgttcctcatgaccatcctcacagtcacaaagttccggggcttctgttttatctgttataagacagcccagagactggtgttcaaggaccatccccagggcacagaacctgatatgtacaaatatgatgcctatttgtgcttcagcagcaaagacttcacatgggtgcagaatgctttgctcaaacacctggacactcaatacagtgaccaaaacagattcaacctgtgctttgaagaaagagactttgtcccaggagaaaaccgcattgccaatatccaggatgccatctggaacagtagaaagatcgtttgtcttgtgagcagacacttccttagagatggctggtgccttgaagccttcagttatgcccagggcaggtgcttatctgaccttaacagtgctctcatcatggtggtggttgggtccttgtcccagtaccagttgatgaaacatcaatccatcagaggctttgtacagaaacagcagtatttgaggtggcctgaggatctccaggatgttggctggtttcttcataaactctctcaacagatactaaagaaagaaaaagaaaagaagaaagacaataacattccgttgcaaactgtagcaaccatctcctaa

SEQ ID NO: 9608 - RNA, 2577 nt, synthetic construct
  misc_feature 1..2577: note = derived and/or modified sequence opt1 fromTLR5__Homo_sapiens__AAZ17462
  source 1..2577: mol_type = other RNA
atgggcgaccacctggacctcctgctgggggtggtcctcatggccggccccgtgttcgggatcccgagctgctccttcgacggccgcatcgccttctaccggttctgcaacctgacccaggtgccccaggtcctgaacaccacggagcgcctcctgctgagcttcaactacatccggaccgtgaccgcgtccagcttccccttcctcgagcagctgcagctgctcgagctggggtcccagtacacgcccctgaccatcgacaaggaggccttccgcaacctcccgaacctgcggatcctggacctcggcagctccaagatctacttcctgcaccccgacgccttccagggcctgttccacctcttcgagctgcgcctgtacttctgcgggctcagcgacgccgtgctgaaggacggctacttccggaacctgaaggccctcacccgcctggacctgtccaagaaccagatccggagcctctacctgcacccctccttcgggaagctgaacagcctcaagtccatcgacttcagctccaaccagatcttcctggtctgcgagcacgagctggagcccctccagggcaagaccctgagcttcttctccctggcggccaacagcctctactcccgcgtgagcgtggactgggggaagtgcatgaacccgttccggaacatggtcctggagatcctggacgtgagcggcaacggctggaccgtggacatcacggggaacttctccaacgccatcagcaagtcccaggccttcagcctcatcctggcgcaccacatcatgggcgccgggttcggcttccacaacatcaaggaccccgaccagaacaccttcgccggcctggcccgctccagcgtccggcacctcgacctgtcccacgggttcgtgttcagcctgaactcccgcgtgttcgagaccctcaaggacctgaaggtcctgaacctggcctacaacaagatcaacaagatcgcggacgaggccttctacggcctcgacaacctccaggtgctgaacctgagctacaacctgctgggggagctctactccagcaacttctacggcctgcccaaggtggcctacatcgacctgcagaagaaccacatcgccatcatccaggaccagaccttcaagttcctcgagaagctgcagacgctggacctccgggacaacgccctgaccaccatccacttcatcccctccatcccggacatcttcctgagcgggaacaagctcgtcaccctgcccaagatcaacctgacggcgaacctcatccacctgtccgagaaccgcctggagaacctcgacatcctgtacttcctgctccgggtgccccacctccagatcctgatcctgaaccagaaccgcttcagctcctgcagcggcgaccagaccccctccgagaacccgagcctggagcagctgttcctcggcgagaacatgctgcagctggcctgggagaccgagctctgctgggacgtgttcgaggggctgagccacctccaggtcctgtacctgaaccacaactacctgaactccctcccgcccggcgtgttcagccacctgaccgccctgcgggggctctccctgaacagcaaccgcctgacggtgctctcccacaacgacctgcccgccaacctggagatcctcgacatcagccggaaccagctgctggcccccaaccccgacgtcttcgtgtccctcagcgtcctggacatcacccacaacaagttcatctgcgagtgcgagctgtccaccttcatcaactggctcaaccacaccaacgtgacgatcgcgggcccgcccgccgacatctactgcgtgtaccccgacagcctgtccggggtcagcctgttctccctcagcaccgagggctgcgacgaggaggaggtgctgaagtccctgaagttcagcctcttcttcgtgtgcaccgtcaccctgacgctgttcctcatgaccatcctgaccgtgaccaagttccgcggcttctgcttcatctgctacaagacggcccagcgcctggtgttcaaggaccacccccaggggaccgagcccgacatgtacaagtacgacgcctacctctgcttctccagcaaggacttcacctgggtccagaacgccctgctgaagcacctcgacacccagtacagcgaccagaaccggttcaacctgtgcttcgaggagcgcgacttcgtgcccggcgagaaccggatcgcgaacatccaggacgccatctggaactcccgcaagatcgtgtgcctggtcagccggcacttcctccgcgacgggtggtgcctggaggccttctcctacgcccagggccggtgcctgagcgacctcaactccgcgctgatcatggtggtggtcgggagcctgtcccagtaccagctcatgaagcaccagagcatccgcggcttcgtgcagaagcagcagtacctgcggtggccggaggacctgcaggacgtgggctggttcctccacaagctgtcccagcagatcctgaagaaggagaaggagaagaagaaggacaacaacatccccctccagacggtcgccaccatcagctga

SEQ ID NO: 9609 - RNA, 2577 nt, synthetic construct
  misc_feature 1..2577: note = derived and/or modified sequence opt2 fromTLR5__Homo_sapiens__AAZ17462
  source 1..2577: mol_type = other RNA
atgggcgaccacctcgacctcctcctcggcgtcgtcctcatggccggccccgtcttcggcatcccctcctgctccttcgacggccgcatcgccttctaccgcttctgcaacctcacccaggtcccccaggtcctcaacaccaccgagcgcctcctcctctccttcaactacatccgcaccgtcaccgcctcctccttccccttcctcgagcagctccagctcctcgagctcggctcccagtacacccccctcaccatcgacaaggaggccttccgcaacctccccaacctccgcatcctcgacctcggctcctccaagatctacttcctccaccccgacgccttccagggcctcttccacctcttcgagctccgcctctacttctgcggcctctccgacgccgtcctcaaggacggctacttccgcaacctcaaggccctcacccgcctcgacctctccaagaaccagatccgctccctctacctccacccctccttcggcaagctcaactccctcaagtccatcgacttctcctccaaccagatcttcctcgtctgcgagcacgagctcgagcccctccagggcaagaccctctccttcttctccctcgccgccaactccctctactcccgcgtctccgtcgactggggcaagtgcatgaaccccttccgcaacatggtcctcgagatcctcgacgtctccggcaacggctggaccgtcgacatcaccggcaacttctccaacgccatctccaagtcccaggccttctccctcatcctcgcccaccacatcatgggcgccggcttcggcttccacaacatcaaggaccccgaccagaacaccttcgccggcctcgcccgctcctccgtccgccacctcgacctctcccacggcttcgtcttctccctcaactcccgcgtcttcgagaccctcaaggacctcaaggtcctcaacctcgcctacaacaagatcaacaagatcgccgacgaggccttctacggcctcgacaacctccaggtcctcaacctctcctacaacctcctcggcgagctctactcctccaacttctacggcctccccaaggtcgcctacatcgacctccagaagaaccacatcgccatcatccaggaccagaccttcaagttcctcgagaagctccagaccctcgacctccgcgacaacgccctcaccaccatccacttcatcccctccatccccgacatcttcctctccggcaacaagctcgtcaccctccccaagatcaacctcaccgccaacctcatccacctctccgagaaccgcctcgagaacctcgacatcctctacttcctcctccgcgtcccccacctccagatcctcatcctcaaccagaaccgcttctcctcctgctccggcgaccagaccccctccgagaacccctccctcgagcagctcttcctcggcgagaacatgctccagctcgcctgggagaccgagctctgctgggacgtcttcgagggcctctcccacctccaggtcctctacctcaaccacaactacctcaactccctcccccccggcgtcttctcccacctcaccgccctccgcggcctctccctcaactccaaccgcctcaccgtcctctcccacaacgacctccccgccaacctcgagatcctcgacatctcccgcaaccagctcctcgcccccaaccccgacgtcttcgtctccctctccgtcctcgacatcacccacaacaagttcatctgcgagtgcgagctctccaccttcatcaactggctcaaccacaccaacgtcaccatcgccggcccccccgccgacatctactgcgtctaccccgactccctctccggcgtctccctcttctccctctccaccgagggctgcgacgaggaggaggtcctcaagtccctcaagttctccctcttcttcgtctgcaccgtcaccctcaccctcttcctcatgaccatcctcaccgtcaccaagttccgcggcttctgcttcatctgctacaagaccgcccagcgcctcgtcttcaaggaccacccccagggcaccgagcccgacatgtacaagtacgacgcctacctctgcttctcctccaaggacttcacctgggtccagaacgccctcctcaagcacctcgacacccagtactccgaccagaaccgcttcaacctctgcttcgaggagcgcgacttcgtccccggcgagaaccgcatcgccaacatccaggacgccatctggaactcccgcaagatcgtctgcctcgtctcccgccacttcctccgcgacggctggtgcctcgaggccttctcctacgcccagggccgctgcctctccgacctcaactccgccctcatcatggtcgtcgtcggctccctctcccagtaccagctcatgaagcaccagtccatccgcggcttcgtccagaagcagcagtacctccgctggcccgaggacctccaggacgtcggctggttcctccacaagctctcccagcagatcctcaagaaggagaaggagaagaagaaggacaacaacatccccctccagaccgtcgccaccatctcctga

SEQ ID NO: 9610 - RNA, 2577 nt, synthetic construct
  misc_feature 1..2577: note = derived and/or modified sequence opt3 fromTLR5__Homo_sapiens__AAZ17462
  source 1..2577: mol_type = other RNA
atgggcgaccacctggatctccttctgggggtggtcttgatggccggacccgttttcggtatccctagctgctcctttgacggcagaattgctttctacaggttttgtaacttaacccaggtgccacaagtactgaatacaactgagcggctactcctgtctttcaactatatacgcacggtgaccgcatcaagttttccgttccttgaacagctgcagttgctcgagctggggagccagtacacacccctgactatcgataaggaagcctttcgaaatctccctaacttacgtattctggaccttggatcctctaaaatctatttcttgcatccagatgcgtttcaaggcctgttccacctatttgagctcagactgtacttctgcggtctttcggacgctgtcctgaaggatgggtattttaggaatttgaaagccctcacccggctggacttatcaaagaaccagattcgcagcctgtacctccatcccagtttcggaaaacttaattccctgaagtctatcgatttcagctccaaccagatatttttggtgtgtgaacacgagctagagcctctgcagggcaagacactctcattctttagtctggcagccaatagcctttattctagagtttccgtggactggggcaaatgcatgaacccattcaggaatatggtcctggaaatcttggatgtgtcagggaacggatggaccgtagacattactggtaattttagcaacgctatcagtaagtctcaagcattctccctcattctggcccatcacatcatgggcgctgggtttggattccacaatataaaagatcccgaccagaacacatttgccggcttagcgcggagctcggttcgccatctggacctatctcacggtttcgtgttttccctcaactcacgagtcttcgagaccctgaaggatcttaaagtgttgaatctggcatacaacaagattaataagatcgccgacgaggctttttacgggctcgataacctgcaagtgcttaatctgagttataacttgctcggagaactgtacagctccaatttctatggcttacctaaagtcgcctacattgacctgcagaagaaccatatcgcaatcattcaggatcagacgttcaaatttctagagaagctccagactctggaccttagagataatgctttgaccacaatacacttcatcccatctattccggacatctttctgagcggcaacaaactcgttactctgcccaagataaatttaaccgccaacctgattcacctttcagaaaataggttggagaacctcgatatcctgtatttcctactgcgggtgcctcatctccaaatcctgattcttaatcagaaccgttttagttcctgtagcggggaccagacaccatctgaaaacccctcattggagcagctgttcttaggagaaaatatgctccaactggcgtgggagaccgagctttgctgggatgtatttgaaggtctgagtcacctccaggtgttgtacctgaaccataattatctaaacagcctgcctccaggcgtcttctcccacctcacggccctgcgcgggctttctttgaactcgaatagactgactgtgttaagccataatgacctccccgcaaacctggagatccttgacatttccaggaatcagctgctagctccgaaccctgatgtttttgtgtcactcagtgtcctggacataacacacaataaattcatctgtgaatgcgagttgtctacctttattaactggctgaatcacactaacgtgacaatcgccggacccccagctgatatctactgtgtataccctgacagcttatccggcgtttcactcttcagcctgtctaccgaaggttgcgatgaggaggaagtgcttaagtccctgaagtttagtttgttcttcgtctgtacggtgaccctcacactgtttctaatgactattctgaccgtcacaaaattccgggggttttgcttcatatgctataagactgcccagcgacttgtgtttaaagaccatccccaaggcaccgagccagatatgtacaagtatgacgcatacctctgtttcagctctaaagattttacatgggttcagaatgccctgttgaagcacctggacacccagtattccgatcagaaccgcttcaacttatgctttgaagagagagacttcgtgcccggagaaaataggatcgctaacattcaagatgcgatctggaatagtcggaagattgtatgtctcgtctcacgccattttctgagagacggctggtgccttgaggcattcagctacgcccaggggaggtgtctgtcggacttgaactccgctctcatcatggtggttgtgggatctctgagccagtatcagctaatgaaacaccaatcaatacgtggtttcgtccagaagcagcaatacctgcggtggcctgaggatcttcaggacgtgggctggtttctccacaaactgagtcagcagatcttgaagaaagaaaaggagaagaaaaaggataataacattccattacaaactgtagccacgatctcctga

SEQ ID NO: 9611 - RNA, 2577 nt, synthetic construct
  misc_feature 1..2577: note = derived and/or modified sequence opt4 fromTLR5__Homo_sapiens__AAZ17462
  source 1..2577: mol_type = other RNA
atgggcgaccacctggacctgctgctgggcgtggtgctgatggccggccccgtgttcggcatccccagctgcagcttcgacggcagaatcgccttctacagattctgcaacctgacccaggtgccccaggtgctgaacaccaccgagagactgctgctgagcttcaactacatcagaaccgtgaccgccagcagcttccccttcctggagcagctgcagctgctggagctgggcagccagtacacccccctgaccatcgacaaggaggccttcagaaacctgcccaacctgagaatcctggacctgggcagcagcaagatctacttcctgcaccccgacgccttccagggcctgttccacctgttcgagctgagactgtacttctgcggcctgagcgacgccgtgctgaaggacggctacttcagaaacctgaaggccctgaccagactggacctgagcaagaaccagatcagaagcctgtacctgcaccccagcttcggcaagctgaacagcctgaagagcatcgacttcagcagcaaccagatcttcctggtgtgcgagcacgagctggagcccctgcagggcaagaccctgagcttcttcagcctggccgccaacagcctgtacagcagagtgagcgtggactggggcaagtgcatgaaccccttcagaaacatggtgctggagatcctggacgtgagcggcaacggctggaccgtggacatcaccggcaacttcagcaacgccatcagcaagagccaggccttcagcctgatcctggcccaccacatcatgggcgccggcttcggcttccacaacatcaaggaccccgaccagaacaccttcgccggcctggccagaagcagcgtgagacacctggacctgagccacggcttcgtgttcagcctgaacagcagagtgttcgagaccctgaaggacctgaaggtgctgaacctggcctacaacaagatcaacaagatcgccgacgaggccttctacggcctggacaacctgcaggtgctgaacctgagctacaacctgctgggcgagctgtacagcagcaacttctacggcctgcccaaggtggcctacatcgacctgcagaagaaccacatcgccatcatccaggaccagaccttcaagttcctggagaagctgcagaccctggacctgagagacaacgccctgaccaccatccacttcatccccagcatccccgacatcttcctgagcggcaacaagctggtgaccctgcccaagatcaacctgaccgccaacctgatccacctgagcgagaacagactggagaacctggacatcctgtacttcctgctgagagtgccccacctgcagatcctgatcctgaaccagaacagattcagcagctgcagcggcgaccagacccccagcgagaaccccagcctggagcagctgttcctgggcgagaacatgctgcagctggcctgggagaccgagctgtgctgggacgtgttcgagggcctgagccacctgcaggtgctgtacctgaaccacaactacctgaacagcctgccccccggcgtgttcagccacctgaccgccctgagaggcctgagcctgaacagcaacagactgaccgtgctgagccacaacgacctgcccgccaacctggagatcctggacatcagcagaaaccagctgctggcccccaaccccgacgtgttcgtgagcctgagcgtgctggacatcacccacaacaagttcatctgcgagtgcgagctgagcaccttcatcaactggctgaaccacaccaacgtgaccatcgccggcccccccgccgacatctactgcgtgtaccccgacagcctgagcggcgtgagcctgttcagcctgagcaccgagggctgcgacgaggaggaggtgctgaagagcctgaagttcagcctgttcttcgtgtgcaccgtgaccctgaccctgttcctgatgaccatcctgaccgtgaccaagttcagaggcttctgcttcatctgctacaagaccgcccagagactggtgttcaaggaccacccccagggcaccgagcccgacatgtacaagtacgacgcctacctgtgcttcagcagcaaggacttcacctgggtgcagaacgccctgctgaagcacctggacacccagtacagcgaccagaacagattcaacctgtgcttcgaggagagagacttcgtgcccggcgagaacagaatcgccaacatccaggacgccatctggaacagcagaaagatcgtgtgcctggtgagcagacacttcctgagagacggctggtgcctggaggccttcagctacgcccagggcagatgcctgagcgacctgaacagcgccctgatcatggtggtggtgggcagcctgagccagtaccagctgatgaagcaccagagcatcagaggcttcgtgcagaagcagcagtacctgagatggcccgaggacctgcaggacgtgggctggttcctgcacaagctgagccagcagatcctgaagaaggagaaggagaagaagaaggacaacaacatccccctgcagaccgtggccaccatcagctga

SEQ ID NO: 9612 - RNA, 2577 nt, synthetic construct
  misc_feature 1..2577: note = derived and/or modified sequence opt5 fromTLR5__Homo_sapiens__AAZ17462
  source 1..2577: mol_type = other RNA
atgggcgaccacctggatctcctgcttggggtggtcctgatggccggacccgttttcggcatccctagctgctcctttgacgggagaattgctttctaccggttttgtaacctcacccaggtgccgcaagtgctgaatacaacggagcgccttctgctctctttcaactatatcagaaccgtcacagccagctcctttcccttcctggaacagctgcagctcctggagcttggatctcagtacacccctctgacaattgataaggaagcgtttcggaatctccccaacctgcgcatccttgacctgggcagctccaaaatttatttcctccatcctgatgcttttcaagggctgttccacctgtttgagctcagactgtacttctgcggactttctgacgccgtgctgaaggatggctattttcggaatctcaaagccctgacccgccttgacctgagcaagaaccagatcagatccctctacctgcatcccagcttcggcaaactcaattctctcaagtccatcgatttcagctctaaccagatttttctggtttgtgaacacgagcttgagcctctgcaggggaagacactctccttctttagcctggctgccaattctctttattcccgggtgagcgtcgactggggaaaatgcatgaacccgttccgcaatatggtgctggaaatcctcgatgtttccggcaacgggtggaccgtggacattacgggaaatttttctaacgctatcagcaagtcccaagccttcagcctgattctggcgcatcacatcatgggcgccgggtttggattccacaatattaaagatcccgaccagaacacctttgctggcctcgccagatcttccgtccggcatctggaccttagccacggcttcgtgttttctctgaacagccgcgtgttcgagacactcaaggatctgaaagtcctgaatcttgcttacaacaagatcaataagatcgccgacgaagcgttttacgggctcgataacctgcaggttctgaatctctcctataacctgcttggagagctgtactctagcaatttctatggcctccctaaagtggcctacattgacctgcagaagaaccatatcgctattatccaagatcagaccttcaaatttctggagaagctgcagacactcgacctgagagataatgccctgaccacgattcacttcatcccctccatccctgacatttttctcagcgggaacaaactggtgacacttcccaagatcaatctgaccgctaacctcattcacctgtctgaaaatcggctggagaaccttgatatcctctatttcctgctgcgcgtcccgcatctccaaattctgatccttaatcagaacagattttccagctgttctggagaccagacaccttccgaaaaccccagcctggagcagctgttcctgggcgaaaatatgctgcaacttgcctgggagaccgagctctgctgggatgtgtttgaagggctgtcccaccttcaggttctctacctgaaccataattatcttaactctctgcctcccggagtgttcagccacctcaccgccctgcggggcctgtcccttaattctaacagactgacagtcctcagccataatgacctgcccgctaacctcgagatcctggacatttcccgcaatcagcttctggcgcctaacccggatgtgtttgttagcctctctgtgctggacatcacgcacaataaattcatttgtgaatgcgagctgtccacctttatcaactggcttaatcacacaaacgtcaccattgccgggccccctgctgatatctactgtgtgtaccccgacagcctgtctggcgtctccctcttcagcctgtctacagaaggatgcgatgaggaggaagtgctcaagagcctgaagttttcccttttcttcgtttgtaccgtgacgctgacactctttctgatgaccattctgaccgtcacaaaattccggggcttttgcttcatctgctataagaccgcccagagacttgtgtttaaagaccatcctcaagggacagagcccgatatgtacaagtatgacgcctacctgtgtttcagctctaaagattttacgtgggttcagaatgctctcctgaagcacctcgacacccagtattccgatcagaaccgcttcaacctgtgctttgaggaacgggacttcgtgccgggagaaaatagaatcgccaacattcaagatgcgatctggaatagccgcaagattgtctgtcttgtgtcccggcattttctgagagacggctggtgcctggaggctttctcttacgcccaggggcgctgtctcagcgacctgaactccgcccttatcatggtggttgtcggctctctgagccagtatcagctcatgaaacaccaatccattcggggattcgtgcagaagcagcaatacctgagatggcctgaggatctccaggacgtgggctggtttctgcacaaactttctcagcagatcctgaagaaagaaaaggagaagaaaaaggataataacatccccctgcaaacagtcgctaccattagctga

SEQ ID NO: 9613 - protein, 858 aa, synthetic construct [sequence omitted]

SEQ ID NO: 9614 - RNA, 2577 nt, synthetic construct
  misc_feature 1..2577: note = TLR5__Homo_sapiens__AAZ17465
  source 1..2577: mol_type = other RNA
atgggagaccacctggaccttctcctaggagtggtgctcatggccggtcctgtgtttggaattccttcctgctcctttgatggccgaatagccttttatcgtttctgcaacctcacccaggtcccccaggtcctcaacaccactgagaggctcctgctgagcttcaactatatcaggacagtcactgcttcatccttcccctttctggaacagctgcagctgctggagctcgggagccagtatatccccttgactattgacaaggaggccttcagaaacctgcccaaccttagaatcttggacctgggaagtagtaagatatacttcttgcatccagatgcttttcagggactgttccatctgtttgaacttagactgtatttctgtggtctctctgatgctgtattgaaagatggttatttcagaaatttaaaggctttaactcgcttggatctatccaaaaatcagattcgtagcctttaccttcatccttcatttgggaagttgaattccttaaagtccatagatttttcctccaaccaaatattccttgtatgtgaacatgagctcgagcccctacaagggaaaacgctctccttttttagcctcgcagctaatagcttgtatagcagagtctcagtggactggggaaaatgtatgaacccattcagaaacatggtgctggagatactagatgtttctggaaatggctggacagtggacatcacaggaaactttagcaatgccatcagcaaaagccaggccttctctttgattcttgcccaccacatcatgggtgccgggtttggcttccataacatcaaagatcctgaccagaacacatttgctggcctggccagaagttcagtgagacacctggatctttcacatgggtttgtcttctccctgaactcacgagtctttgagacactcaaggatttgaaggttctgaaccttgcctacaacaagataaataagattgcagatgaagcattttacggacttgacaacctccaagttctcaatttgtcatataaccttctgggggaactttacagttcgaatttctatggactacctaaggtagcctacattgatttgcaaaagaatcacattgcaataattcaagaccaaacattcaaattcctggaaaaattacagaccttggatctccgagacaatgctcttacaaccattcattttattccaagcatacccgatatcttcttgagtggcaataaactagtgactttgccaaagatcaaccttacagcgaacctcatccacttatcagaaaacaggctagaaaatctagatattctctactttctcctacgggtacctcatctccagattctcattttaaatcaaaatcgcttctcctcctgtagtggagatcaaaccccttcagagaatcccagcttagaacagcttttccttggagaaaatatgttgcaacttgcctgggaaactgagctctgttgggatgtttttgagggactttctcatcttcaagttctgtatttgaatcataactatcttaattcccttccaccaggagtatttagccatctgactgcattaaggggactaagcctcaactccaacaggctgacagttctttctcacaatgatttacctgctaatttagagatcctggacatatccaggaaccagctcctagctcctaatcctgatgtatttgtatcacttagtgtcttggatataactcataacaagttcatttgtgaatgtgaacttagcacttttatcaattggcttaatcacaccaatgtcactatagctgggcctcctgcagacatatattgtgtgtaccctgactcgttctctggggtttccctcttctctctttccacggaaggttgtgatgaagaggaagtcttaaagtccctaaagttctcccttttctttgtatgcactgtcactctgactctgttcctcatgaccatcctcacagtcacaaagttccggggcttctgttttatctgttataagacagcccagagactggtgttcaaggaccatccccagggcacagaacctgatatgtacaaatatgatgcctatttgtgcttcagcagcaaagacttcacatgggtgcagaatgctttgctcaaacacctggacactcaatacagtgaccaaaacagattcaacctgtgctttgaagaaagagactttgtcccaggagaaaaccgcattgccaatatccaggatgccatctggaacagtagaaagatcgtttgtcttgtgagcagacacttccttagagatggctggtgccttgaagccttcagttatgcccagggcaggtgcttatctgaccttaacagtgctctcatcatggtggtggttgggtccttgtcccagtaccagttgatgaaacatcaatccatcagaggctttgtacagaaacagcagtatttgaggtggcctgaggatctccaggatgttggctggtttcttcataaactctctcaacagatactaaagaaagaaaaagaaaagaagaaagacaataacattccgttgcaaactgtagcaaccatctcctaa

SEQ ID NO: 9615 - RNA, 2577 nt, synthetic construct
  misc_feature 1..2577: note = derived and/or modified sequence opt1 fromTLR5__Homo_sapiens__AAZ17465
  source 1..2577: mol_type = other RNA
atgggcgaccacctggacctcctgctgggggtggtcctcatggccggccccgtgttcgggatcccgagctgctccttcgacggccgcatcgccttctaccggttctgcaacctgacccaggtgccccaggtcctgaacaccacggagcgcctcctgctgagcttcaactacatccggaccgtgaccgcgtccagcttccccttcctcgagcagctgcagctgctcgagctggggtcccagtacatccccctgaccatcgacaaggaggccttccgcaacctcccgaacctgcggatcctggacctcggcagctccaagatctacttcctgcaccccgacgccttccagggcctgttccacctcttcgagctgcgcctgtacttctgcgggctcagcgacgccgtgctgaaggacggctacttccggaacctgaaggccctcacgcgcctggacctgtccaagaaccagatccggagcctctacctgcacccctccttcgggaagctgaacagcctcaagtccatcgacttcagctccaaccagatcttcctggtctgcgagcacgagctggagcccctccagggcaagaccctgagcttcttctccctggcggccaacagcctctactcccgcgtgagcgtggactgggggaagtgcatgaacccgttccggaacatggtcctggagatcctggacgtgagcggcaacggctggaccgtggacatcaccgggaacttctccaacgccatcagcaagtcccaggccttcagcctcatcctggcgcaccacatcatgggcgccgggttcggcttccacaacatcaaggaccccgaccagaacacgttcgccggcctggcccgctccagcgtccggcacctcgacctgtcccacgggttcgtgttcagcctgaactcccgcgtgttcgagaccctcaaggacctgaaggtcctgaacctggcctacaacaagatcaacaagatcgcggacgaggccttctacggcctcgacaacctccaggtgctgaacctgagctacaacctgctgggggagctctactccagcaacttctacggcctgcccaaggtggcctacatcgacctgcagaagaaccacatcgccatcatccaggaccagaccttcaagttcctcgagaagctgcagaccctggacctccgggacaacgccctgacgaccatccacttcatcccctccatcccggacatcttcctgagcgggaacaagctcgtcaccctgcccaagatcaacctgaccgcgaacctcatccacctgtccgagaaccgcctggagaacctcgacatcctgtacttcctgctccgggtgccccacctccagatcctgatcctgaaccagaaccgcttcagctcctgcagcggcgaccagacgccctccgagaacccgagcctggagcagctgttcctcggcgagaacatgctgcagctggcctgggagaccgagctctgctgggacgtgttcgaggggctgagccacctccaggtcctgtacctgaaccacaactacctgaactccctcccgcccggcgtgttcagccacctgaccgccctgcgggggctctccctgaacagcaaccgcctgaccgtgctctcccacaacgacctgcccgccaacctggagatcctcgacatcagccggaaccagctgctggcccccaaccccgacgtcttcgtgtccctcagcgtcctggacatcacgcacaacaagttcatctgcgagtgcgagctgtccaccttcatcaactggctcaaccacaccaacgtgaccatcgcgggcccgcccgccgacatctactgcgtgtaccccgacagcttctccggggtcagcctgttctccctgagcacggagggctgcgacgaggaggaggtgctcaagtccctgaagttcagcctgttcttcgtgtgcaccgtcaccctcaccctgttcctgatgacgatcctcaccgtgaccaagttccgcggcttctgcttcatctgctacaagaccgcccagcgcctggtgttcaaggaccacccccaggggacggagcccgacatgtacaagtacgacgcctacctgtgcttctccagcaaggacttcacctgggtccagaacgccctcctgaagcacctggacacccagtacagcgaccagaaccggttcaacctctgcttcgaggagcgcgacttcgtgcccggcgagaaccggatcgcgaacatccaggacgccatctggaactcccgcaagatcgtgtgcctggtcagccggcacttcctgcgcgacgggtggtgcctcgaggccttctcctacgcccagggccggtgcctgagcgacctgaactccgcgctcatcatggtggtggtcgggagcctgtcccagtaccagctgatgaagcaccagagcatccgcggcttcgtgcagaagcagcagtacctccggtggccggaggacctgcaggacgtgggctggttcctgcacaagctctcccagcagatcctgaagaaggagaaggagaagaagaaggacaacaacatccccctgcagaccgtcgccacgatcagctga

SEQ ID NO: 9616 - RNA, 2577 nt, synthetic construct
  misc_feature 1..2577: note = derived and/or modified sequence opt2 fromTLR5__Homo_sapiens__AAZ17465
  source 1..2577: mol_type = other RNA
atgggcgaccacctcgacctcctcctcggcgtcgtcctcatggccggccccgtcttcggcatcccctcctgctccttcgacggccgcatcgccttctaccgcttctgcaacctcacccaggtcccccaggtcctcaacaccaccgagcgcctcctcctctccttcaactacatccgcaccgtcaccgcctcctccttccccttcctcgagcagctccagctcctcgagctcggctcccagtacatccccctcaccatcgacaaggaggccttccgcaacctccccaacctccgcatcctcgacctcggctcctccaagatctacttcctccaccccgacgccttccagggcctcttccacctcttcgagctccgcctctacttctgcggcctctccgacgccgtcctcaaggacggctacttccgcaacctcaaggccctcacccgcctcgacctctccaagaaccagatccgctccctctacctccacccctccttcggcaagctcaactccctcaagtccatcgacttctcctccaaccagatcttcctcgtctgcgagcacgagctcgagcccctccagggcaagaccctctccttcttctccctcgccgccaactccctctactcccgcgtctccgtcgactggggcaagtgcatgaaccccttccgcaacatggtcctcgagatcctcgacgtctccggcaacggctggaccgtcgacatcaccggcaacttctccaacgccatctccaagtcccaggccttctccctcatcctcgcccaccacatcatgggcgccggcttcggcttccacaacatcaaggaccccgaccagaacaccttcgccggcctcgcccgctcctccgtccgccacctcgacctctcccacggcttcgtcttctccctcaactcccgcgtcttcgagaccctcaaggacctcaaggtcctcaacctcgcctacaacaagatcaacaagatcgccgacgaggccttctacggcctcgacaacctccaggtcctcaacctctcctacaacctcctcggcgagctctactcctccaacttctacggcctccccaaggtcgcctacatcgacctccagaagaaccacatcgccatcatccaggaccagaccttcaagttcctcgagaagctccagaccctcgacctccgcgacaacgccctcaccaccatccacttcatcccctccatccccgacatcttcctctccggcaacaagctcgtcaccctccccaagatcaacctcaccgccaacctcatccacctctccgagaaccgcctcgagaacctcgacatcctctacttcctcctccgcgtcccccacctccagatcctcatcctcaaccagaaccgcttctcctcctgctccggcgaccagaccccctccgagaacccctccctcgagcagctcttcctcggcgagaacatgctccagctcgcctgggagaccgagctctgctgggacgtcttcgagggcctctcccacctccaggtcctctacctcaaccacaactacctcaactccctcccccccggcgtcttctcccacctcaccgccctccgcggcctctccctcaactccaaccgcctcaccgtcctctcccacaacgacctccccgccaacctcgagatcctcgacatctcccgcaaccagctcctcgcccccaaccccgacgtcttcgtctccctctccgtcctcgacatcacccacaacaagttcatctgcgagtgcgagctctccaccttcatcaactggctcaaccacaccaacgtcaccatcgccggcccccccgccgacatctactgcgtctaccccgactccttctccggcgtctccctcttctccctctccaccgagggctgcgacgaggaggaggtcctcaagtccctcaagttctccctcttcttcgtctgcaccgtcaccctcaccctcttcctcatgaccatcctcaccgtcaccaagttccgcggcttctgcttcatctgctacaagaccgcccagcgcctcgtcttcaaggaccacccccagggcaccgagcccgacatgtacaagtacgacgcctacctctgcttctcctccaaggacttcacctgggtccagaacgccctcctcaagcacctcgacacccagtactccgaccagaaccgcttcaacctctgcttcgaggagcgcgacttcgtccccggcgagaaccgcatcgccaacatccaggacgccatctggaactcccgcaagatcgtctgcctcgtctcccgccacttcctccgcgacggctggtgcctcgaggccttctcctacgcccagggccgctgcctctccgacctcaactccgccctcatcatggtcgtcgtcggctccctctcccagtaccagctcatgaagcaccagtccatccgcggcttcgtccagaagcagcagtacctccgctggcccgaggacctccaggacgtcggctggttcctccacaagctctcccagcagatcctcaagaaggagaaggagaagaagaaggacaacaacatccccctccagaccgtcgccaccatctcctga

SEQ ID NO: 9617 - RNA, 2577 nt, synthetic construct
  misc_feature 1..2577: note = derived and/or modified sequence opt3 fromTLR5__Homo_sapiens__AAZ17465
  source 1..2577: mol_type = other RNA
atgggcgaccacctggatctccttctgggggtggtcttgatggccggacccgttttcggtatccctagctgctcctttgacggcagaattgctttctacaggttttgtaacttaacccaggtgccacaagtactgaatacaactgagcggctactcctgtctttcaactatatacgcacggtgaccgcatcaagttttccgttccttgaacagctgcagttgctcgagctggggagccagtacatccccctgacaattgataaggaagcctttcgaaatctccctaacttacgtatcctggaccttggatcctctaaaatttatttcttgcatccagatgcgtttcaaggcctgttccacctatttgagctcagactgtacttctgcggtctttcggacgctgtcctgaaggatgggtattttaggaatttgaaagccctcactcggctggacttatcaaagaaccagatccgcagcctgtacctccatcccagtttcggaaaacttaattccctgaagtctatagatttcagctccaaccagatctttttggtgtgtgaacacgagctagagcctctgcagggcaagaccctctcattctttagtctggcagccaatagcctttattctagagtttccgtggactggggcaaatgcatgaacccattcaggaatatggtcctggaaattttggatgtgtcagggaacggatggacagtagacatcaccggtaattttagcaacgctattagtaagtctcaagcattctccctcatcctggcccatcacataatgggcgctgggtttggattccacaatattaaagatcccgaccagaacacttttgccggcttagcgcggagctcggttcgccatctggacctatctcacggtttcgtgttttccctcaactcacgagtcttcgagacactgaaggatcttaaagtgttgaatctggcatacaacaagatcaataagattgccgacgaggctttttacgggctcgataacctgcaagtgcttaatctgagttataacttgctcggagaactgtacagctccaatttctatggcttacctaaagtcgcctacatcgacctgcagaagaaccatatcgcaattatacaggatcagaccttcaaatttctagagaagctccagacgctggaccttagagataatgctttgactaccatccacttcattccatctatcccggacatatttctgagcggcaacaaactcgttacactgcccaagattaatttaactgccaacctgatccacctttcagaaaataggttggagaacctcgatatcctgtatttcctactgcgggtgcctcatctccaaattctgatccttaatcagaaccgttttagttcctgtagcggggaccagaccccatctgaaaacccctcattggagcagctgttcttaggagaaaatatgctccaactggcgtgggagacagagctttgctgggatgtatttgaaggtctgagtcacctccaggtgttgtacctgaaccataattatctaaacagcctgcctccaggcgtcttctcccacctcaccgccctgcgcgggctttctttgaactcgaatagactgacggtgttaagccataatgacctccccgcaaacctggagattcttgacatatccaggaatcagctgctagctccgaaccctgatgtttttgtgtcactcagtgtcctggacatcactcacaataaattcatttgtgaatgcgagttgtctacatttatcaactggctgaatcacaccaacgtgactatcgccggacccccagctgatatttactgtgtataccctgacagcttctccggcgtttcattatttagcctctctacagaaggttgcgatgaggaggaagtgctgaagtcccttaagttcagtctgttctttgtctgtaccgtgacgttgaccctcttcctgatgacaatactaactgtcaccaaatttcgggggttctgctttatctgctataagacagcccagcgactggtgttcaaagaccatccccaaggcactgagccagatatgtacaagtatgacgcatacctttgttttagctctaaagatttcacctgggttcagaatgccctcctgaagcacttggacacacagtattccgatcagaaccgctttaacctgtgcttcgaagagagagactttgtgcccggagaaaataggattgctaacatccaagatgcgatttggaatagtcggaagatcgtatgtttagtctcacgccatttcctcagagacggctggtgcctggaggcattcagctacgcccaggggaggtgtctttcggacctgaactccgctttgataatggtggttgtgggatctctcagccagtatcagctgatgaaacaccaatcaatccgtggttttgtccagaagcagcaatacctacggtggcctgaggatctgcaggacgtgggctggttccttcacaaactcagtcagcagattctgaagaaagaaaaggagaagaaaaaggataataacatcccattgcaaaccgtagccactatttcctga

SEQ ID NO: 9618 - RNA, 2577 nt, synthetic construct
  misc_feature 1..2577: note = derived and/or modified sequence opt4 fromTLR5__Homo_sapiens__AAZ17465
  source 1..2577: mol_type = other RNA
atgggcgaccacctggacctgctgctgggcgtggtgctgatggccggccccgtgttcggcatccccagctgcagcttcgacggcagaatcgccttctacagattctgcaacctgacccaggtgccccaggtgctgaacaccaccgagagactgctgctgagcttcaactacatcagaaccgtgaccgccagcagcttccccttcctggagcagctgcagctgctggagctgggcagccagtacatccccctgaccatcgacaaggaggccttcagaaacctgcccaacctgagaatcctggacctgggcagcagcaagatctacttcctgcaccccgacgccttccagggcctgttccacctgttcgagctgagactgtacttctgcggcctgagcgacgccgtgctgaaggacggctacttcagaaacctgaaggccctgaccagactggacctgagcaagaaccagatcagaagcctgtacctgcaccccagcttcggcaagctgaacagcctgaagagcatcgacttcagcagcaaccagatcttcctggtgtgcgagcacgagctggagcccctgcagggcaagaccctgagcttcttcagcctggccgccaacagcctgtacagcagagtgagcgtggactggggcaagtgcatgaaccccttcagaaacatggtgctggagatcctggacgtgagcggcaacggctggaccgtggacatcaccggcaacttcagcaacgccatcagcaagagccaggccttcagcctgatcctggcccaccacatcatgggcgccggcttcggcttccacaacatcaaggaccccgaccagaacaccttcgccggcctggccagaagcagcgtgagacacctggacctgagccacggcttcgtgttcagcctgaacagcagagtgttcgagaccctgaaggacctgaaggtgctgaacctggcctacaacaagatcaacaagatcgccgacgaggccttctacggcctggacaacctgcaggtgctgaacctgagctacaacctgctgggcgagctgtacagcagcaacttctacggcctgcccaaggtggcctacatcgacctgcagaagaaccacatcgccatcatccaggaccagaccttcaagttcctggagaagctgcagaccctggacctgagagacaacgccctgaccaccatccacttcatccccagcatccccgacatcttcctgagcggcaacaagctggtgaccctgcccaagatcaacctgaccgccaacctgatccacctgagcgagaacagactggagaacctggacatcctgtacttcctgctgagagtgccccacctgcagatcctgatcctgaaccagaacagattcagcagctgcagcggcgaccagacccccagcgagaaccccagcctggagcagctgttcctgggcgagaacatgctgcagctggcctgggagaccgagctgtgctgggacgtgttcgagggcctgagccacctgcaggtgctgtacctgaaccacaactacctgaacagcctgccccccggcgtgttcagccacctgaccgccctgagaggcctgagcctgaacagcaacagactgaccgtgctgagccacaacgacctgcccgccaacctggagatcctggacatcagcagaaaccagctgctggcccccaaccccgacgtgttcgtgagcctgagcgtgctggacatcacccacaacaagttcatctgcgagtgcgagctgagcaccttcatcaactggctgaaccacaccaacgtgaccatcgccggcccccccgccgacatctactgcgtgtaccccgacagcttcagcggcgtgagcctgttcagcctgagcaccgagggctgcgacgaggaggaggtgctgaagagcctgaagttcagcctgttcttcgtgtgcaccgtgaccctgaccctgttcctgatgaccatcctgaccgtgaccaagttcagaggcttctgcttcatctgctacaagaccgcccagagactggtgttcaaggaccacccccagggcaccgagcccgacatgtacaagtacgacgcctacctgtgcttcagcagcaaggacttcacctgggtgcagaacgccctgctgaagcacctggacacccagtacagcgaccagaacagattcaacctgtgcttcgaggagagagacttcgtgcccggcgagaacagaatcgccaacatccaggacgccatctggaacagcagaaagatcgtgtgcctggtgagcagacacttcctgagagacggctggtgcctggaggccttcagctacgcccagggcagatgcctgagcgacctgaacagcgccctgatcatggtggtggtgggcagcctgagccagtaccagctgatgaagcaccagagcatcagaggcttcgtgcagaagcagcagtacctgagatggcccgaggacctgcaggacgtgggctggttcctgcacaagctgagccagcagatcctgaagaaggagaaggagaagaagaaggacaacaacatccccctgcagaccgtggccaccatcagctga

SEQ ID NO: 9619 - RNA, 2577 nt, synthetic construct
  misc_feature 1..2577: note = derived and/or modified sequence opt5 fromTLR5__Homo_sapiens__AAZ17465
  source 1..2577: mol_type = other RNA
atgggcgaccacctggatctcctgcttggggtggtcctgatggccggacccgttttcggcatccctagctgctcctttgacgggagaattgctttctaccggttttgtaacctcacccaggtgccgcaagtgctgaatacaacggagcgccttctgctctctttcaactatatcagaaccgtcacagccagctcctttcccttcctggaacagctgcagctcctggagcttggatctcagtacattcctctgaccatcgataaggaagcgtttcggaatctccccaacctgcgcattcttgacctgggcagctccaaaatctatttcctccatcctgatgcttttcaagggctgttccacctgtttgagctcagactgtacttctgcggactttctgacgccgtgctgaaggatggctattttcggaatctcaaagccctgacacgccttgacctgagcaagaaccagatcagatccctctacctgcatcccagcttcggcaaactcaattctctcaagtccattgatttcagctctaaccagatctttctggtttgtgaacacgagcttgagcctctgcaggggaagaccctctccttctttagcctggctgccaattctctttattcccgggtgagcgtcgactggggaaaatgcatgaacccgttccgcaatatggtgctggaaattctcgatgtttccggcaacgggtggacagtggacatcaccggaaatttttctaacgctattagcaagtcccaagccttcagcctgatcctggcgcatcacattatgggcgccgggtttggattccacaatatcaaagatcccgaccagaacacgtttgctggcctcgccagatcttccgtccggcatctggaccttagccacggcttcgtgttttctctgaacagccgcgtgttcgagaccctcaaggatctgaaagtcctgaatcttgcttacaacaagatcaataagattgccgacgaagcgttttacgggctcgataacctgcaggttctgaatctctcctataacctgcttggagagctgtactctagcaatttctatggcctccctaaagtggcctacatcgacctgcagaagaaccatattgctatcattcaagatcagacattcaaatttctggagaagctgcagaccctcgacctgagagataatgccctgacaaccatccacttcatcccctccattcctgacatctttctcagcgggaacaaactggtgacgcttcccaagattaatctgacagctaacctcatccacctgtctgaaaatcggctggagaaccttgatattctctatttcctgctgcgcgtcccgcatctccaaatcctgatccttaatcagaacagattttccagctgttctggagaccagaccccttccgaaaaccccagcctggagcagctgttcctgggcgaaaatatgctgcaacttgcctgggagacagagctctgctgggatgtgtttgaagggctgtcccatctgcaggttctctacctgaaccacaattatcttaactctctgcctcccggagtgttcagccacctcaccgccctgcggggcctgtcccttaattctaacagactgaccgtcctcagccataatgacctgcccgctaacctcgagattctggacatctcccgcaatcagcttctggcgcctaacccggatgtgtttgttagcctctctgtgctggacattacacacaataaattcatctgtgaatgcgagctgtccacgtttattaactggcttaatcacaccaacgtcacaatcgccgggccccctgctgatatttactgtgtgtaccccgacagcttctctggcgtctccctgtttagcctctctaccgaaggatgcgatgaggaggaagtgcttaagagcctcaagttctccctgttctttgtttgtacagtgacccttacgctgttcctcatgacaatcctgaccgtcaccaaatttcggggcttctgctttatctgctataagacagcccagagactggtgttcaaagaccatcctcaagggaccgagcccgatatgtacaagtatgacgcctacctttgttttagctctaaagatttcacatgggttcagaatgctctgctcaagcacctggacacgcagtattccgatcagaaccgctttaacctctgcttcgaggaacgggactttgtgccgggagaaaatagaattgccaacatccaagatgcgatttggaatagccgcaagatcgtctgtctggtgtcccggcatttccttagagacggctggtgcctggaggctttctcttacgcccaggggcgctgtctgagcgacctcaactccgccctgattatggtggttgtcggctctcttagccagtatcagctgatgaaacaccaatccatccggggatttgtgcagaagcagcaatacctcagatggcctgaggatctgcaggacgtgggctggttcctccacaaactgtctcagcagatccttaagaaagaaaaggagaagaaaaaggataataacattcccctgcaaaccgtcgctacaatcagctga

SEQ ID NO: 9620 - protein, 858 aa, synthetic construct [sequence omitted]

SEQ ID NO: 9621 - RNA, 2577 nt, synthetic construct
  misc_feature 1..2577: note = TLR5__Homo_sapiens__AAZ17466
  source 1..2577: mol_type = other RNA
atgggagaccacctggaccttctcctaggagtggtgctcatggccggtcctgtgtttggaattccttcctgctcctttgatggccgaatagccttttatcgtttctgcaacctcacccaggtcccccaggtcctcaacaccactgagaggctcctgctgagcttcaactatatcaggacagtcactgcttcatccttcccctttctggaacagctgcagctgctggagctcgggagccagtatacccccttgactattgacaaggaggccttcagaaacctgcccaaccttagaatcttggacctgggaagtagtaagatatacttcttgcatccagatgcttttcagggactgttccatctgtttgaacttagactgtatttctgtggtctctctgatgctgtattgaaagatggttatttcagaaatttaaaggctttaactcgcttggatctatccaaaaatcagattcgtagcctttaccttcatccttcatttgggaagttgaattccttaaagtccatagatttttcctccaacaaaatattccttgtatgtgaacatgagctcgagcccctacaagggaaaacgctctccttttttagcctcgcagctaatagcttgtatagcagagtctcagtggactggggaaaatgtatgaacccattcagaaacatggtgctggagatactagatgtttctggaaatggctggacagtggacatcacaggaaactttagcaatgccatcagcaaaagccaggccttctctttgattcttgcccaccacatcatgggtgccgggtttggcttccataacatcaaagatcctgaccagaacacatttgctggcctggccagaagttcagtgagacacctggatctttcacatgggtttgtcttctccctgaactcacgagtctttgagacactcaaggatttgaaggttctgaaccttgcctacaacaagataaataagattgcagatgaagcattttacggacttgacaacctccaagttctcaatttgtcatataaccttctgggggaactttacagttcgaatttctatggactacctaaggtagcctacattgatttgcaaaagaatcacattgcaataattcaagaccaaacattcaaattcctggaaaaattacagaccttggatctccgagacaatgctcttacaaccattcattttattccaagcatacccgatatcttcttgagtggcaataaactagtgactttgccaaagatcaaccttacagcgaacctcatccacttatcagaaaacaggctagaaaatctagatattctctactttctcctacgggtacctcatctccagattctcattttaaatcaaaatcgcttctcctcctgtagtggagatcaaaccccttcagagaatcccagcttagaacagcttttccttggagaaaatatgttgcaacttgcctgggaaactgagctctgttgggatgtttttgagggactttctcatcttcaagttctgtatttgaatcataactatcttaattcccttccaccaggagtatttagccatctgactgcattaaggggactaagcctcaactccaacaggctgacagttctttctcacaatgatttacctgctaatttagagatcctggacatatccaggaaccagctcctagctcctaatcctgatgtatttgtatcacttagtgtcttggatataactcataacaagttcatttgtgaatgtgaacttagcacttttatcaattggcttaatcacaccaatgtcactatagctgggcctcctgcagacatatattgtgtgtaccctgactcgctctctggggtttccctcttctctctttccacggaaggttgtgatgaagaggaagtcttaaagtccctaaagttctcccttttctttgtatgcactgtcactctgactctgttcctcatgaccatcctcacagtcacaaagttccggggcttctgttttatctgttataagacagcccagagactggtgttcaaggaccatccccagggcacagaacctgatatgtacaaatatgatgcctatttgtgcttcagcagcaaagacttcacatgggtgcagaatgctttgctcaaacacctggacactcaatacagtgaccaaaacagattcaacctgtgctttgaagaaagagactttgtcccaggagaaaaccgcattgccaatatccaggatgccatctggaacagtagaaagatcgtttgtcttgtgagcagacacttccttagagatggctggtgccttgaagccttcagttatgcccagggcaggtgcttatctgaccttaacagtgctctcatcatggtggtggttgggtccttgtcccagtaccagttgatgaaacatcaatccatcagaggctttgtacagaaacagcagtatttgaggtggcctgaggatctccaggatgttggctggtttcttcataaactctctcaacagatactaaagaaagaaaaagaaaagaagaaagacaataacattccgttgcaaactgtagcaaccatctcctaa

SEQ ID NO: 9622 - RNA, 2577 nt, synthetic construct
  misc_feature 1..2577: note = derived and/or modified sequence opt1 fromTLR5__Homo_sapiens__AAZ17466
  source 1..2577: mol_type = other RNA
atgggcgaccacctggacctcctgctgggggtggtcctcatggccggccccgtgttcgggatcccgagctgctccttcgacggccgcatcgccttctaccggttctgcaacctgacccaggtgccccaggtcctgaacaccacggagcgcctcctgctgagcttcaactacatccggaccgtgaccgcgtccagcttccccttcctcgagcagctgcagctgctcgagctggggtcccagtacacgcccctgaccatcgacaaggaggccttccgcaacctcccgaacctgcggatcctggacctcggcagctccaagatctacttcctgcaccccgacgccttccagggcctgttccacctcttcgagctgcgcctgtacttctgcgggctcagcgacgccgtgctgaaggacggctacttccggaacctgaaggccctcacccgcctggacctgtccaagaaccagatccggagcctctacctgcacccctccttcgggaagctgaacagcctcaagtccatcgacttcagctccaacaagatcttcctggtctgcgagcacgagctggagcccctccagggcaagaccctgagcttcttctccctggcggccaacagcctctactcccgcgtgagcgtggactgggggaagtgcatgaacccgttccggaacatggtcctggagatcctggacgtgagcggcaacggctggaccgtggacatcacggggaacttctccaacgccatcagcaagtcccaggccttcagcctcatcctggcgcaccacatcatgggcgccgggttcggcttccacaacatcaaggaccccgaccagaacaccttcgccggcctggcccgctccagcgtccggcacctcgacctgtcccacgggttcgtgttcagcctgaactcccgcgtgttcgagaccctcaaggacctgaaggtcctgaacctggcctacaacaagatcaacaagatcgcggacgaggccttctacggcctcgacaacctccaggtgctgaacctgagctacaacctgctgggggagctctactccagcaacttctacggcctgcccaaggtggcctacatcgacctgcagaagaaccacatcgccatcatccaggaccagaccttcaagttcctcgagaagctgcagacgctggacctccgggacaacgccctgaccaccatccacttcatcccctccatcccggacatcttcctgagcgggaacaagctcgtcaccctgcccaagatcaacctgacggcgaacctcatccacctgtccgagaaccgcctggagaacctcgacatcctgtacttcctgctccgggtgccccacctccagatcctgatcctgaaccagaaccgcttcagctcctgcagcggcgaccagaccccctccgagaacccgagcctggagcagctgttcctcggcgagaacatgctgcagctggcctgggagaccgagctctgctgggacgtgttcgaggggctgagccacctccaggtcctgtacctgaaccacaactacctgaactccctcccgcccggcgtgttcagccacctgaccgccctgcgggggctctccctgaacagcaaccgcctgacggtgctctcccacaacgacctgcccgccaacctggagatcctcgacatcagccggaaccagctgctggcccccaaccccgacgtcttcgtgtccctcagcgtcctggacatcacccacaacaagttcatctgcgagtgcgagctgtccaccttcatcaactggctcaaccacaccaacgtgacgatcgcgggcccgcccgccgacatctactgcgtgtaccccgacagcctgtccggggtcagcctgttctccctcagcaccgagggctgcgacgaggaggaggtgctgaagtccctgaagttcagcctcttcttcgtgtgcaccgtcaccctgacgctgttcctcatgaccatcctgaccgtgaccaagttccgcggcttctgcttcatctgctacaagacggcccagcgcctggtgttcaaggaccacccccaggggaccgagcccgacatgtacaagtacgacgcctacctctgcttctccagcaaggacttcacctgggtccagaacgccctgctgaagcacctcgacacccagtacagcgaccagaaccggttcaacctgtgcttcgaggagcgcgacttcgtgcccggcgagaaccggatcgcgaacatccaggacgccatctggaactcccgcaagatcgtgtgcctggtcagccggcacttcctccgcgacgggtggtgcctggaggccttctcctacgcccagggccggtgcctgagcgacctcaactccgcgctgatcatggtggtggtcgggagcctgtcccagtaccagctcatgaagcaccagagcatccgcggcttcgtgcagaagcagcagtacctgcggtggccggaggacctgcaggacgtgggctggttcctccacaagctgtcccagcagatcctgaagaaggagaaggagaagaagaaggacaacaacatccccctccagacggtcgccaccatcagctga

SEQ ID NO: 9623 - RNA, 2577 nt, synthetic construct
  misc_feature 1..2577: note = derived and/or modified sequence opt2 fromTLR5__Homo_sapiens__AAZ17466
  source 1..2577: mol_type = other RNA
atgggcgaccacctcgacctcctcctcggcgtcgtcctcatggccggccccgtcttcggcatcccctcctgctccttcgacggccgcatcgccttctaccgcttctgcaacctcacccaggtcccccaggtcctcaacaccaccgagcgcctcctcctctccttcaactacatccgcaccgtcaccgcctcctccttccccttcctcgagcagctccagctcctcgagctcggctcccagtacacccccctcaccatcgacaaggaggccttccgcaacctccccaacctccgcatcctcgacctcggctcctccaagatctacttcctccaccccgacgccttccagggcctcttccacctcttcgagctccgcctctacttctgcggcctctccgacgccgtcctcaaggacggctacttccgcaacctcaaggccctcacccgcctcgacctctccaagaaccagatccgctccctctacctccacccctccttcggcaagctcaactccctcaagtccatcgacttctcctccaacaagatcttcctcgtctgcgagcacgagctcgagcccctccagggcaagaccctctccttcttctccctcgccgccaactccctctactcccgcgtctccgtcgactggggcaagtgcatgaaccccttccgcaacatggtcctcgagatcctcgacgtctccggcaacggctggaccgtcgacatcaccggcaacttctccaacgccatctccaagtcccaggccttctccctcatcctcgcccaccacatcatgggcgccggcttcggcttccacaacatcaaggaccccgaccagaacaccttcgccggcctcgcccgctcctccgtccgccacctcgacctctcccacggcttcgtcttctccctcaactcccgcgtcttcgagaccctcaaggacctcaaggtcctcaacctcgcctacaacaagatcaacaagatcgccgacgaggccttctacggcctcgacaacctccaggtcctcaacctctcctacaacctcctcggcgagctctactcctccaacttctacggcctccccaaggtcgcctacatcgacctccagaagaaccacatcgccatcatccaggaccagaccttcaagttcctcgagaagctccagaccctcgacctccgcgacaacgccctcaccaccatccacttcatcccctccatccccgacatcttcctctccggcaacaagctcgtcaccctccccaagatcaacctcaccgccaacctcatccacctctccgagaaccgcctcgagaacctcgacatcctctacttcctcctccgcgtcccccacctccagatcctcatcctcaaccagaaccgcttctcctcctgctccggcgaccagaccccctccgagaacccctccctcgagcagctcttcctcggcgagaacatgctccagctcgcctgggagaccgagctctgctgggacgtcttcgagggcctctcccacctccaggtcctctacctcaaccacaactacctcaactccctcccccccggcgtcttctcccacctcaccgccctccgcggcctctccctcaactccaaccgcctcaccgtcctctcccacaacgacctccccgccaacctcgagatcctcgacatctcccgcaaccagctcctcgcccccaaccccgacgtcttcgtctccctctccgtcctcgacatcacccacaacaagttcatctgcgagtgcgagctctccaccttcatcaactggctcaaccacaccaacgtcaccatcgccggcccccccgccgacatctactgcgtctaccccgactccctctccggcgtctccctcttctccctctccaccgagggctgcgacgaggaggaggtcctcaagtccctcaagttctccctcttcttcgtctgcaccgtcaccctcaccctcttcctcatgaccatcctcaccgtcaccaagttccgcggcttctgcttcatctgctacaagaccgcccagcgcctcgtcttcaaggaccacccccagggcaccgagcccgacatgtacaagtacgacgcctacctctgcttctcctccaaggacttcacctgggtccagaacgccctcctcaagcacctcgacacccagtactccgaccagaaccgcttcaacctctgcttcgaggagcgcgacttcgtccccggcgagaaccgcatcgccaacatccaggacgccatctggaactcccgcaagatcgtctgcctcgtctcccgccacttcctccgcgacggctggtgcctcgaggccttctcctacgcccagggccgctgcctctccgacctcaactccgccctcatcatggtcgtcgtcggctccctctcccagtaccagctcatgaagcaccagtccatccgcggcttcgtccagaagcagcagtacctccgctggcccgaggacctccaggacgtcggctggttcctccacaagctctcccagcagatcctcaagaaggagaaggagaagaagaaggacaacaacatccccctccagaccgtcgccaccatctcctga

SEQ ID NO: 9624 - RNA, 2577 nt, synthetic construct
  misc_feature 1..2577: note = derived and/or modified sequence opt3 fromTLR5__Homo_sapiens__AAZ17466
  source 1..2577: mol_type = other RNA
atgggcgaccacctggatctccttctgggggtggtcttgatggccggacccgttttcggtatccctagctgctcctttgacggcagaattgctttctacaggttttgtaacttaacccaggtgccacaagtactgaatacaactgagcggctactcctgtctttcaactatatacgcacggtgaccgcatcaagttttccgttccttgaacagctgcagttgctcgagctggggagccagtacacacccctgactatcgataaggaagcctttcgaaatctccctaacttacgtattctggaccttggatcctctaaaatctatttcttgcatccagatgcgtttcaaggcctgttccacctatttgagctcagactgtacttctgcggtctttcggacgctgtcctgaaggatgggtattttaggaatttgaaagccctcacccggctggacttatcaaagaaccagattcgcagcctgtacctccatcccagtttcggaaaacttaattccctgaagtctatcgatttcagctccaacaagatatttttggtgtgtgaacacgagctagagcctctgcagggcaaaacactctcattctttagtctggcagccaatagcctttattctagagtttccgtggactggggcaagtgcatgaacccattcaggaatatggtcctggaaatcttggatgtgtcagggaacggatggaccgtagacattactggtaattttagcaacgctatcagtaaatctcaggcattctccctcattctggcccatcacatcatgggcgctgggtttggattccacaatataaaggatcccgaccaaaacacatttgccggcttagcgcggagctcggttcgccatctggacctatctcacggtttcgtgttttccctcaactcacgagtcttcgagaccctgaaagatcttaaggtgttgaatctggcatacaacaagattaataaaatcgccgacgaggctttttacgggctcgataaccttcaggtgctgaatctgagttataacttgctcggagaactgtacagctccaatttctatggcttacctaaggtcgcctacattgacctgcagaaaaaccatatcgcaatcattcaggatcaaacgttcaagtttctagagaaactccagactctggaccttagagataatgctttgaccacaatacacttcatcccatctattccggacatctttctgagcggcaacaagctcgttactctgcccaaaataaatttaaccgccaacctgattcacctttcagaaaataggttggagaacctcgatatcctgtatttcctactgcgggtgcctcatctccagatcctgattcttaatcaaaaccgttttagttcctgtagcggggaccagacaccatctgaaaacccctcattggagcagctgttcttaggagaaaatatgctccagctggcgtgggagaccgagctttgctgggatgtatttgaaggtctgagtcacttgcaagtgctctacctgaaccataattatctaaacagcctgcctccaggcgtcttctcccacctcacggccctgcgcgggctttctttgaactcgaatagactgactgtgttaagccataatgacctccccgcaaacctggagatccttgacatttccaggaatcagctgctagctccgaaccctgatgtttttgtgtcactcagtgtcctggacataacacacaataagttcatctgtgaatgcgagttgtctacctttattaactggctgaatcacactaacgtgacaatcgccggacccccagctgatatctactgtgtataccctgacagcttatccggcgtttcactcttcagcctgtctaccgaaggttgcgatgaggaggaagtgcttaagtccctgaaatttagtttgttcttcgtctgtacggtgaccctcacactgtttctaatgactattctgaccgtcacaaagttccgggggttttgcttcatatgctataaaactgcccagcgacttgtgtttaaggaccatccccagggcaccgagccagatatgtacaaatatgacgcatacctctgtttcagctctaaggattttacatgggttcaaaatgccctgttgaagcacctggacacccagtattccgatcagaaccgcttcaacttatgctttgaagagagagacttcgtgcccggagaaaataggatcgctaacattcaggatgcgatctggaatagtcggaaaattgtatgtctcgtctcacgccattttctgagagacggctggtgccttgaggcattcagctacgcccaagggaggtgtctgtcggacttgaactccgctctcatcatggtggttgtgggatctctgagccagtatcagctaatgaagcaccagtcaatacgtggtttcgtccaaaaacagcagtacctgcggtggcctgaggatcttcaagacgtgggctggtttctccacaagctgagtcagcagatcttgaaaaaggaaaaggagaaaaagaaagataataacattccattacagactgtagccacgatctcctga

SEQ ID NO: 9625 - RNA, 2577 nt, synthetic construct
  misc_feature 1..2577: note = derived and/or modified sequence opt4 fromTLR5__Homo_sapiens__AAZ17466
  source 1..2577: mol_type = other RNA
atgggcgaccacctggacctgctgctgggcgtggtgctgatggccggccccgtgttcggcatccccagctgcagcttcgacggcagaatcgccttctacagattctgcaacctgacccaggtgccccaggtgctgaacaccaccgagagactgctgctgagcttcaactacatcagaaccgtgaccgccagcagcttccccttcctggagcagctgcagctgctggagctgggcagccagtacacccccctgaccatcgacaaggaggccttcagaaacctgcccaacctgagaatcctggacctgggcagcagcaagatctacttcctgcaccccgacgccttccagggcctgttccacctgttcgagctgagactgtacttctgcggcctgagcgacgccgtgctgaaggacggctacttcagaaacctgaaggccctgaccagactggacctgagcaagaaccagatcagaagcctgtacctgcaccccagcttcggcaagctgaacagcctgaagagcatcgacttcagcagcaacaagatcttcctggtgtgcgagcacgagctggagcccctgcagggcaagaccctgagcttcttcagcctggccgccaacagcctgtacagcagagtgagcgtggactggggcaagtgcatgaaccccttcagaaacatggtgctggagatcctggacgtgagcggcaacggctggaccgtggacatcaccggcaacttcagcaacgccatcagcaagagccaggccttcagcctgatcctggcccaccacatcatgggcgccggcttcggcttccacaacatcaaggaccccgaccagaacaccttcgccggcctggccagaagcagcgtgagacacctggacctgagccacggcttcgtgttcagcctgaacagcagagtgttcgagaccctgaaggacctgaaggtgctgaacctggcctacaacaagatcaacaagatcgccgacgaggccttctacggcctggacaacctgcaggtgctgaacctgagctacaacctgctgggcgagctgtacagcagcaacttctacggcctgcccaaggtggcctacatcgacctgcagaagaaccacatcgccatcatccaggaccagaccttcaagttcctggagaagctgcagaccctggacctgagagacaacgccctgaccaccatccacttcatccccagcatccccgacatcttcctgagcggcaacaagctggtgaccctgcccaagatcaacctgaccgccaacctgatccacctgagcgagaacagactggagaacctggacatcctgtacttcctgctgagagtgccccacctgcagatcctgatcctgaaccagaacagattcagcagctgcagcggcgaccagacccccagcgagaaccccagcctggagcagctgttcctgggcgagaacatgctgcagctggcctgggagaccgagctgtgctgggacgtgttcgagggcctgagccacctgcaggtgctgtacctgaaccacaactacctgaacagcctgccccccggcgtgttcagccacctgaccgccctgagaggcctgagcctgaacagcaacagactgaccgtgctgagccacaacgacctgcccgccaacctggagatcctggacatcagcagaaaccagctgctggcccccaaccccgacgtgttcgtgagcctgagcgtgctggacatcacccacaacaagttcatctgcgagtgcgagctgagcaccttcatcaactggctgaaccacaccaacgtgaccatcgccggcccccccgccgacatctactgcgtgtaccccgacagcctgagcggcgtgagcctgttcagcctgagcaccgagggctgcgacgaggaggaggtgctgaagagcctgaagttcagcctgttcttcgtgtgcaccgtgaccctgaccctgttcctgatgaccatcctgaccgtgaccaagttcagaggcttctgcttcatctgctacaagaccgcccagagactggtgttcaaggaccacccccagggcaccgagcccgacatgtacaagtacgacgcctacctgtgcttcagcagcaaggacttcacctgggtgcagaacgccctgctgaagcacctggacacccagtacagcgaccagaacagattcaacctgtgcttcgaggagagagacttcgtgcccggcgagaacagaatcgccaacatccaggacgccatctggaacagcagaaagatcgtgtgcctggtgagcagacacttcctgagagacggctggtgcctggaggccttcagctacgcccagggcagatgcctgagcgacctgaacagcgccctgatcatggtggtggtgggcagcctgagccagtaccagctgatgaagcaccagagcatcagaggcttcgtgcagaagcagcagtacctgagatggcccgaggacctgcaggacgtgggctggttcctgcacaagctgagccagcagatcctgaagaaggagaaggagaagaagaaggacaacaacatccccctgcagaccgtggccaccatcagctga

SEQ ID NO: 9626 - RNA, 2577 nt, synthetic construct
  misc_feature 1..2577: note = derived and/or modified sequence opt5 fromTLR5__Homo_sapiens__AAZ17466
  source 1..2577: mol_type = other RNA
atgggcgaccacctggatctcctgcttggggtggtcctgatggccggacccgttttcggcatccctagctgctcctttgacgggagaattgctttctaccggttttgtaacctcacccaggtgccgcaagtgctgaatacaacggagcgccttctgctctctttcaactatatcagaaccgtcacagccagctcctttcccttcctggaacagctgcagctcctggagcttggatctcagtacacccctctgacaattgataaggaagcgtttcggaatctccccaacctgcgcatccttgacctgggcagctccaaaatttatttcctccatcctgatgcttttcaagggctgttccacctgtttgagctcagactgtacttctgcggactttctgacgccgtgctgaaggatggctattttcggaatctcaaagccctgacccgccttgacctgagcaagaaccagatcagatccctctacctgcatcccagcttcggcaaactcaattctctcaagtccatcgatttcagctctaacaagatttttctggtttgtgaacacgagcttgagcctctgcaggggaaaacactctccttctttagcctggctgccaattctctttattcccgggtgagcgtcgactggggaaagtgcatgaacccgttccgcaatatggtgctggaaatcctcgatgtttccggcaacgggtggaccgtggacattacgggaaatttttctaacgctatcagcaaatcccaggccttcagcctgattctggcgcatcacatcatgggcgccgggtttggattccacaatattaaggatcccgaccaaaacacctttgctggcctcgccagatcttccgtccggcatctggaccttagccacggcttcgtgttttctctgaacagccgcgtgttcgagacactcaaagatctgaaggtcctgaatcttgcttacaacaagatcaataaaatcgccgacgaagcgttttacgggctcgataacctgcaggttctgaatctctcctataacctgcttggagagctgtactctagcaatttctatggcctccctaaggtggcctacattgacctgcagaaaaaccatatcgctattatccaggatcaaaccttcaagtttctggagaaacttcagacactcgacctgagagataatgccctgaccacgattcacttcatcccctccatccctgacatttttctcagcgggaacaagctggtgacacttcccaaaatcaatctgaccgctaacctcattcacctgtctgaaaatcggctggagaaccttgatatcctctatttcctgctgcgcgtcccgcatctccagattctgatccttaatcaaaacagattttccagctgttctggagaccagacaccttccgaaaaccccagcctggagcagctgttcctgggcgaaaatatgctgcagcttgcctgggagaccgagctctgctgggatgtgtttgaagggctgtcccaccttcaagttctctacctgaaccataattatcttaactctctgcctcccggagtgttcagccacctcaccgccctgcggggcctgtcccttaattctaacagactgacagtcctcagccataatgacctgcccgctaacctcgagatcctggacatttcccgcaatcagcttctggcgcctaacccggatgtgtttgttagcctctctgtgctggacatcacgcacaataagttcatttgtgaatgcgagctgtccacctttatcaactggcttaatcacacaaacgtcaccattgccgggccccctgctgatatctactgtgtgtaccccgacagcctgtctggcgtctccctcttcagcctgtctacagaaggatgcgatgaggaggaagtgctcaagagcctgaaattttcccttttcttcgtttgtaccgtgacgctgacactctttctgatgaccattctgaccgtcacaaagttccggggcttttgcttcatctgctataaaaccgcccagagacttgtgtttaaggaccatcctcaggggacagagcccgatatgtacaaatatgacgcctacctgtgtttcagctctaaggattttacgtgggttcaaaatgctctcctgaagcacctcgacacccagtattccgatcagaaccgcttcaacctgtgctttgaggaacgggacttcgtgccgggagaaaatagaatcgccaacattcaggatgcgatctggaatagccgcaaaattgtctgtcttgtgtcccggcattttctgagagacggctggtgcctggaggctttctcttacgcccaagggcgctgtctcagcgacctgaactccgcccttatcatggtggttgtcggctctctgagccagtatcagctcatgaagcaccagtccattcggggattcgtgcaaaaacagcagtacctgagatggcctgaggatctccaagacgtgggctggtttctgcacaagctgtctcagcagatcctgaaaaaggaaaaggagaaaaagaaagataataacatccccctgcagacagtcgctaccattagctga

SEQ ID NO: 9627 - protein, 858 aa, synthetic construct [sequence omitted]

SEQ ID NO: 9628 - RNA, 2577 nt, synthetic construct
  misc_feature 1..2577: note = TLR5__Homo_sapiens__AAZ17467
  source 1..2577: mol_type = other RNA
atgggagaccacctggaccttctcctaggagtggtgctcatggccggtcctgtgtttggaattccttcctgctcctttgatggccgaatagccttttatcgtttctgcaacctcacccaggtcccccaggtcctcaacaccactgagaggctcctgctgagcttcaactatatcaggacagtcactgcttcatccttcccctttctggaacagctgcagctgctggagctcgggagccagtatacccccttgactattgacaaggaggccttcagaaacctgcccaaccttagaatcttggacctgggaagtagtaagatatacttcttgcatccagatgcttttcagggactgttccatctgtttgaacttagactgtatttctgtggtctctctgatgctgtattgaaagatggttatttcagaaatttaaaggctttaactcgcttggatctatccaaaaatcagattcgtagcctttaccttcatccttcatttgggaagttgaattccttaaagtccatagatttttcctccaaccaaatattccttgtatgtgaacatgagctcgagcccctacaagggaaaacgctctccttttttagcctcgcagctaatagcttgtatagcagagtctcagtggactggggaaaatgtatgaacccattcagaaacatggtgctggagatactagatgtttctggaaatggctggacagtggacatcacaggaaactttagcaatgccatcagcaaaagccaggccttctctttgattcttgcccaccacatcatgggtgccgggtttggcttccataacatcaaagatcctgaccagaacacatttgctggcctggccagaagttcagtgagacacctggatctttcacatgggtttgtcttctccctgaactcacgagtctttgagacactcaaggatttgaaggttctgaaccttgcctacaacaagataaataagattgcagatgaagcattttacggacttgacaacctccaagttctcaatttgtcatataaccttctgggggaactttacagttcgaatttctatggactacctaaggtagcctacattgatttgcaaaagaatcacattgcaataattcaagaccaaacattcaaattcctggaaaaattacagaccttggatctccgagacaatgctcttacaaccattcattttattccaagcatacccgatatcttcttgagtggcaataaactagtgactttgccaaagatcaaccttacagcgaacctcatccacttatcagaaaacaggctagaaaatctagatattctctactttctcctacgggtacctcatctccagattctcattttaaatcaaaatcgcttctcctcctgtagtggagatcaaaccccttcagagaatcccagcttagaacagcttttccttggagaaaatatattgcaaattgcctgggaaactgagctctgttgggatgtttttgagggactttctcatcttcaagttctgtatttgaatcataactatcttaattcccttccaccaggagtatttagccatctgactgcattaaggggactaagcctcaactccaacaggctgacagttctttctcacaatgatttacctgctaatttagagatcctggacatatccaggaaccagctcctagctcctaatcctgatgtatttgtatcacttagtgtcttggatataactcataacaagttcatttgtgaatgtgaacttagcacttttatcaattggcttaatcacaccaatgtcactatagctgggcctcctgcagacatatattgtgtgtaccctgactcgctctctggggtttccctcttctctctttccacggaaggttgtgatgaagaggaagtcttaaagtccctaaagttctcccttttctttgtatgcactgtcactctgactctgttcctcatgaccatcctcacagtcacaaagttccggggcttctgttttatctgttataagacagcccagagactggtgttcaaggaccatccccagggcacagaacctgatatgtacaaatatgatgcctatttgtgcttcagcagcaaagacttcacatgggtgcagaatgctttgctcaaacacctggacactcaatacagtgaccaaaacagattcaacctgtgctttgaagaaagagactttgtcccaggagaaaaccgcattgccaatatccaggatgccatctggaacagtagaaagatcgtttgtcttgtgagcagacacttccttagagatggctggtgccttgaagccttcagttatgcccagggcaggtgcttatctgaccttaacagtgctctcatcatggtggtggttgggtccttgtcccagtaccagttgatgaaacatcaatccatcagaggctttgtacagaaacagcagtatttgaggtggcctgaggatctccaggatgttggctggtttcttcataagctctctcaacagatactaaagaaagaaaaagaaaagaagaaaggcaataacattccgttgcaaactgtagcaaccatctcctaa

SEQ ID NO: 9629 - RNA, 2577 nt, synthetic construct
  misc_feature 1..2577: note = derived and/or modified sequence opt1 fromTLR5__Homo_sapiens__AAZ17467
  source 1..2577: mol_type = other RNA
atgggcgaccacctggacctcctgctgggggtggtcctcatggccggccccgtgttcgggatcccgagctgctccttcgacggccgcatcgccttctaccggttctgcaacctgacccaggtgccccaggtcctgaacaccacggagcgcctcctgctgagcttcaactacatccggaccgtgaccgcgtccagcttccccttcctcgagcagctgcagctgctcgagctggggtcccagtacacgcccctgaccatcgacaaggaggccttccgcaacctcccgaacctgcggatcctggacctcggcagctccaagatctacttcctgcaccccgacgccttccagggcctgttccacctcttcgagctgcgcctgtacttctgcgggctcagcgacgccgtgctgaaggacggctacttccggaacctgaaggccctcacccgcctggacctgtccaagaaccagatccggagcctctacctgcacccctccttcgggaagctgaacagcctcaagtccatcgacttcagctccaaccagatcttcctggtctgcgagcacgagctggagcccctccagggcaagaccctgagcttcttctccctggcggccaacagcctctactcccgcgtgagcgtggactgggggaagtgcatgaacccgttccggaacatggtcctggagatcctggacgtgagcggcaacggctggaccgtggacatcacggggaacttctccaacgccatcagcaagtcccaggccttcagcctcatcctggcgcaccacatcatgggcgccgggttcggcttccacaacatcaaggaccccgaccagaacaccttcgccggcctggcccgctccagcgtccggcacctcgacctgtcccacgggttcgtgttcagcctgaactcccgcgtgttcgagaccctcaaggacctgaaggtcctgaacctggcctacaacaagatcaacaagatcgcggacgaggccttctacggcctcgacaacctccaggtgctgaacctgagctacaacctgctgggggagctctactccagcaacttctacggcctgcccaaggtggcctacatcgacctgcagaagaaccacatcgccatcatccaggaccagaccttcaagttcctcgagaagctgcagacgctggacctccgggacaacgccctgaccaccatccacttcatcccctccatcccggacatcttcctgagcgggaacaagctcgtcaccctgcccaagatcaacctgacggcgaacctcatccacctgtccgagaaccgcctggagaacctcgacatcctgtacttcctgctccgggtgccccacctccagatcctgatcctgaaccagaaccgcttcagctcctgcagcggcgaccagaccccctccgagaacccgagcctggagcagctgttcctcggcgagaacatcctgcagatcgcctgggagaccgagctgtgctgggacgtgttcgaggggctcagccacctccaggtcctgtacctgaaccacaactacctgaactccctgccgcccggcgtgttcagccacctcaccgccctgcgggggctgtccctcaacagcaaccgcctgacggtgctgtcccacaacgacctccccgccaacctggagatcctggacatcagccggaaccagctcctggcccccaaccccgacgtcttcgtgtccctgagcgtcctcgacatcacccacaacaagttcatctgcgagtgcgagctgtccaccttcatcaactggctgaaccacaccaacgtgacgatcgcgggcccgcccgccgacatctactgcgtgtaccccgacagcctctccggggtcagcctgttctccctgagcaccgagggctgcgacgaggaggaggtgctcaagtccctgaagttcagcctgttcttcgtgtgcaccgtcaccctcacgctgttcctgatgaccatcctcaccgtgaccaagttccgcggcttctgcttcatctgctacaagacggcccagcgcctggtgttcaaggaccacccccaggggaccgagcccgacatgtacaagtacgacgcctacctgtgcttctccagcaaggacttcacctgggtccagaacgccctcctgaagcacctggacacccagtacagcgaccagaaccggttcaacctctgcttcgaggagcgcgacttcgtgcccggcgagaaccggatcgcgaacatccaggacgccatctggaactcccgcaagatcgtgtgcctggtcagccggcacttcctgcgcgacgggtggtgcctcgaggccttctcctacgcccagggccggtgcctgagcgacctgaactccgcgctcatcatggtggtggtcgggagcctgtcccagtaccagctgatgaagcaccagagcatccgcggcttcgtgcagaagcagcagtacctccggtggccggaggacctgcaggacgtgggctggttcctgcacaagctctcccagcagatcctgaagaaggagaaggagaagaagaaggggaacaacatccccctgcagacggtcgccaccatcagctga

SEQ ID NO: 9630 - RNA, 2577 nt, synthetic construct
  misc_feature 1..2577: note = derived and/or modified sequence opt2 fromTLR5__Homo_sapiens__AAZ17467
  source 1..2577: mol_type = other RNA
atgggcgaccacctcgacctcctcctcggcgtcgtcctcatggccggccccgtcttcggcatcccctcctgctccttcgacggccgcatcgccttctaccgcttctgcaacctcacccaggtcccccaggtcctcaacaccaccgagcgcctcctcctctccttcaactacatccgcaccgtcaccgcctcctccttccccttcctcgagcagctccagctcctcgagctcggctcccagtacacccccctcaccatcgacaaggaggccttccgcaacctccccaacctccgcatcctcgacctcggctcctccaagatctacttcctccaccccgacgccttccagggcctcttccacctcttcgagctccgcctctacttctgcggcctctccgacgccgtcctcaaggacggctacttccgcaacctcaaggccctcacccgcctcgacctctccaagaaccagatccgctccctctacctccacccctccttcggcaagctcaactccctcaagtccatcgacttctcctccaaccagatcttcctcgtctgcgagcacgagctcgagcccctccagggcaagaccctctccttcttctccctcgccgccaactccctctactcccgcgtctccgtcgactggggcaagtgcatgaaccccttccgcaacatggtcctcgagatcctcgacgtctccggcaacggctggaccgtcgacatcaccggcaacttctccaacgccatctccaagtcccaggccttctccctcatcctcgcccaccacatcatgggcgccggcttcggcttccacaacatcaaggaccccgaccagaacaccttcgccggcctcgcccgctcctccgtccgccacctcgacctctcccacggcttcgtcttctccctcaactcccgcgtcttcgagaccctcaaggacctcaaggtcctcaacctcgcctacaacaagatcaacaagatcgccgacgaggccttctacggcctcgacaacctccaggtcctcaacctctcctacaacctcctcggcgagctctactcctccaacttctacggcctccccaaggtcgcctacatcgacctccagaagaaccacatcgccatcatccaggaccagaccttcaagttcctcgagaagctccagaccctcgacctccgcgacaacgccctcaccaccatccacttcatcccctccatccccgacatcttcctctccggcaacaagctcgtcaccctccccaagatcaacctcaccgccaacctcatccacctctccgagaaccgcctcgagaacctcgacatcctctacttcctcctccgcgtcccccacctccagatcctcatcctcaaccagaaccgcttctcctcctgctccggcgaccagaccccctccgagaacccctccctcgagcagctcttcctcggcgagaacatcctccagatcgcctgggagaccgagctctgctgggacgtcttcgagggcctctcccacctccaggtcctctacctcaaccacaactacctcaactccctcccccccggcgtcttctcccacctcaccgccctccgcggcctctccctcaactccaaccgcctcaccgtcctctcccacaacgacctccccgccaacctcgagatcctcgacatctcccgcaaccagctcctcgcccccaaccccgacgtcttcgtctccctctccgtcctcgacatcacccacaacaagttcatctgcgagtgcgagctctccaccttcatcaactggctcaaccacaccaacgtcaccatcgccggcccccccgccgacatctactgcgtctaccccgactccctctccggcgtctccctcttctccctctccaccgagggctgcgacgaggaggaggtcctcaagtccctcaagttctccctcttcttcgtctgcaccgtcaccctcaccctcttcctcatgaccatcctcaccgtcaccaagttccgcggcttctgcttcatctgctacaagaccgcccagcgcctcgtcttcaaggaccacccccagggcaccgagcccgacatgtacaagtacgacgcctacctctgcttctcctccaaggacttcacctgggtccagaacgccctcctcaagcacctcgacacccagtactccgaccagaaccgcttcaacctctgcttcgaggagcgcgacttcgtccccggcgagaaccgcatcgccaacatccaggacgccatctggaactcccgcaagatcgtctgcctcgtctcccgccacttcctccgcgacggctggtgcctcgaggccttctcctacgcccagggccgctgcctctccgacctcaactccgccctcatcatggtcgtcgtcggctccctctcccagtaccagctcatgaagcaccagtccatccgcggcttcgtccagaagcagcagtacctccgctggcccgaggacctccaggacgtcggctggttcctccacaagctctcccagcagatcctcaagaaggagaaggagaagaagaagggcaacaacatccccctccagaccgtcgccaccatctcctga

SEQ ID NO: 9631 - RNA, 2577 nt, synthetic construct
  misc_feature 1..2577: note = derived and/or modified sequence opt3 fromTLR5__Homo_sapiens__AAZ17467
  source 1..2577: mol_type = other RNA
atgggcgaccacctggatctccttctgggggtggtcttgatggccggacccgttttcggtatccctagctgctcctttgacggcagaattgctttctacaggttttgtaacttaacccaggtgccacaagtactgaatacaactgagcggctactcctgtctttcaactatatacgcacggtgaccgcatcaagttttccgttccttgaacagctgcagttgctcgagctggggagccagtacacacccctgactatcgataaggaagcctttcgaaatctccctaacttacgtattctggaccttggatcctctaaaatctatttcttgcatccagatgcgtttcaaggcctgttccacctatttgagctcagactgtacttctgcggtctttcggacgctgtcctgaaggatgggtattttaggaatttgaaagccctcacccggctggacttatcaaagaaccagattcgcagcctgtacctccatcccagtttcggaaaacttaattccctgaagtctatcgatttcagctccaaccagatatttttggtgtgtgaacacgagctagagcctctgcagggcaagacactctcattctttagtctggcagccaatagcctttattctagagtttccgtggactggggcaaatgcatgaacccattcaggaatatggtcctggaaatcttggatgtgtcagggaacggatggaccgtagacattactggtaattttagcaacgctatcagtaagtctcaagcattctccctcattctggcccatcacatcatgggcgctgggtttggattccacaatataaaagatcccgaccagaacacatttgccggcttagcgcggagctcggttcgccatctggacctatctcacggtttcgtgttttccctcaactcacgagtcttcgagaccctgaaggatcttaaagtgttgaatctggcatacaacaagattaataagatcgccgacgaggctttttacgggctcgataaccttcaggtgctgaatctgagttataacttgctcggagaactgtacagctccaatttctatggcttacctaaagtcgcctacattgacctgcagaagaaccatatcgcaatcattcaagatcagacgttcaaatttctagagaagctccagactctggaccttagagataatgctttgaccacaatacacttcatcccatctattccggacatctttctgagcggcaacaaactcgttactctgcccaagataaatttaaccgccaacctgattcacctttcagaaaataggttggagaacctcgatatcctgtatttcctactgcgggtgcctcatctccaaatcctgattcttaatcagaaccgttttagttcctgtagcggggaccagacaccatctgaaaacccctcattggagcagctgttcttaggagaaaatatcctccaaattgcgtgggagaccgagctgtgctgggatgtatttgaaggtcttagtcacttgcaagtgctgtacctcaaccataattatctgaacagcctacctccaggcgtcttctcccacctgacggccctccgcgggctgtctcttaattcgaacagattgactgtgctgagccataatgacttacccgcaaacctcgagatactggacatctccaggaatcagcttctggctccgaaccctgatgtttttgtgtcactaagtgtcctcgacattacacacaataaattcatctgtgaatgcgagctgtctacctttatcaactggttgaatcacactaacgtgacaattgccggacccccagctgatatatactgtgtataccctgacagcctgtccggcgtttcattattcagcctctctaccgaaggttgcgatgaggaggaagtgctgaagtcccttaagtttagtctgttcttcgtctgtacggtgaccttgacactctttctgatgactatcctaaccgtcacaaaattccgggggttttgcttcatttgctataagactgcccagcgactggtgtttaaagaccatccccagggcaccgagccagatatgtacaagtatgacgcatacctttgtttcagctctaaagattttacatgggttcagaatgccctcctgaagcacttggacacccagtattccgatcagaaccgcttcaacctgtgctttgaagagagagacttcgtgcccggagaaaataggatcgctaacattcaagatgcgatctggaatagtcggaagatagtatgtttagtctcacgccattttctcagagacggctggtgcctggaggcattcagctacgcccaggggaggtgtctttcggacctgaactccgctttgatcatggtggttgtgggatctctcagccagtatcagctgatgaaacaccaatcaattcgtggtttcgtccagaagcagcaatacctacggtggcctgaggatctgcaggacgtgggctggtttcttcacaaactcagtcagcagatcctgaagaaagaaaaggagaagaaaaaggggaataacattccattgcaaactgtagccacgatctcctga

SEQ ID NO: 9632 - RNA, 2577 nt, synthetic construct
  misc_feature 1..2577: note = derived and/or modified sequence opt4 fromTLR5__Homo_sapiens__AAZ17467
  source 1..2577: mol_type = other RNA
atgggcgaccacctggacctgctgctgggcgtggtgctgatggccggccccgtgttcggcatccccagctgcagcttcgacggcagaatcgccttctacagattctgcaacctgacccaggtgccccaggtgctgaacaccaccgagagactgctgctgagcttcaactacatcagaaccgtgaccgccagcagcttccccttcctggagcagctgcagctgctggagctgggcagccagtacacccccctgaccatcgacaaggaggccttcagaaacctgcccaacctgagaatcctggacctgggcagcagcaagatctacttcctgcaccccgacgccttccagggcctgttccacctgttcgagctgagactgtacttctgcggcctgagcgacgccgtgctgaaggacggctacttcagaaacctgaaggccctgaccagactggacctgagcaagaaccagatcagaagcctgtacctgcaccccagcttcggcaagctgaacagcctgaagagcatcgacttcagcagcaaccagatcttcctggtgtgcgagcacgagctggagcccctgcagggcaagaccctgagcttcttcagcctggccgccaacagcctgtacagcagagtgagcgtggactggggcaagtgcatgaaccccttcagaaacatggtgctggagatcctggacgtgagcggcaacggctggaccgtggacatcaccggcaacttcagcaacgccatcagcaagagccaggccttcagcctgatcctggcccaccacatcatgggcgccggcttcggcttccacaacatcaaggaccccgaccagaacaccttcgccggcctggccagaagcagcgtgagacacctggacctgagccacggcttcgtgttcagcctgaacagcagagtgttcgagaccctgaaggacctgaaggtgctgaacctggcctacaacaagatcaacaagatcgccgacgaggccttctacggcctggacaacctgcaggtgctgaacctgagctacaacctgctgggcgagctgtacagcagcaacttctacggcctgcccaaggtggcctacatcgacctgcagaagaaccacatcgccatcatccaggaccagaccttcaagttcctggagaagctgcagaccctggacctgagagacaacgccctgaccaccatccacttcatccccagcatccccgacatcttcctgagcggcaacaagctggtgaccctgcccaagatcaacctgaccgccaacctgatccacctgagcgagaacagactggagaacctggacatcctgtacttcctgctgagagtgccccacctgcagatcctgatcctgaaccagaacagattcagcagctgcagcggcgaccagacccccagcgagaaccccagcctggagcagctgttcctgggcgagaacatcctgcagatcgcctgggagaccgagctgtgctgggacgtgttcgagggcctgagccacctgcaggtgctgtacctgaaccacaactacctgaacagcctgccccccggcgtgttcagccacctgaccgccctgagaggcctgagcctgaacagcaacagactgaccgtgctgagccacaacgacctgcccgccaacctggagatcctggacatcagcagaaaccagctgctggcccccaaccccgacgtgttcgtgagcctgagcgtgctggacatcacccacaacaagttcatctgcgagtgcgagctgagcaccttcatcaactggctgaaccacaccaacgtgaccatcgccggcccccccgccgacatctactgcgtgtaccccgacagcctgagcggcgtgagcctgttcagcctgagcaccgagggctgcgacgaggaggaggtgctgaagagcctgaagttcagcctgttcttcgtgtgcaccgtgaccctgaccctgttcctgatgaccatcctgaccgtgaccaagttcagaggcttctgcttcatctgctacaagaccgcccagagactggtgttcaaggaccacccccagggcaccgagcccgacatgtacaagtacgacgcctacctgtgcttcagcagcaaggacttcacctgggtgcagaacgccctgctgaagcacctggacacccagtacagcgaccagaacagattcaacctgtgcttcgaggagagagacttcgtgcccggcgagaacagaatcgccaacatccaggacgccatctggaacagcagaaagatcgtgtgcctggtgagcagacacttcctgagagacggctggtgcctggaggccttcagctacgcccagggcagatgcctgagcgacctgaacagcgccctgatcatggtggtggtgggcagcctgagccagtaccagctgatgaagcaccagagcatcagaggcttcgtgcagaagcagcagtacctgagatggcccgaggacctgcaggacgtgggctggttcctgcacaagctgagccagcagatcctgaagaaggagaaggagaagaagaagggcaacaacatccccctgcagaccgtggccaccatcagctga

SEQ ID NO: 9633 - RNA, 2577 nt, synthetic construct
  misc_feature 1..2577: note = derived and/or modified sequence opt5 fromTLR5__Homo_sapiens__AAZ17467
  source 1..2577: mol_type = other RNA
atgggcgaccacctggatctcctgcttggggtggtcctgatggccggacccgttttcggcatccctagctgctcctttgacgggagaattgctttctaccggttttgtaacctcacccaggtgccgcaagtgctgaatacaacggagcgccttctgctctctttcaactatatcagaaccgtcacagccagctcctttcccttcctggaacagctgcagctcctggagcttggatctcagtacacccctctgacaattgataaggaagcgtttcggaatctccccaacctgcgcatccttgacctgggcagctccaaaatttatttcctccatcctgatgcttttcaagggctgttccacctgtttgagctcagactgtacttctgcggactttctgacgccgtgctgaaggatggctattttcggaatctcaaagccctgacccgccttgacctgagcaagaaccagatcagatccctctacctgcatcccagcttcggcaaactcaattctctcaagtccatcgatttcagctctaaccagatttttctggtttgtgaacacgagcttgagcctctgcaggggaagacactctccttctttagcctggctgccaattctctttattcccgggtgagcgtcgactggggaaaatgcatgaacccgttccgcaatatggtgctggaaatcctcgatgtttccggcaacgggtggaccgtggacattacgggaaatttttctaacgctatcagcaagtcccaagccttcagcctgattctggcgcatcacatcatgggcgccgggtttggattccacaatattaaagatcccgaccagaacacctttgctggcctcgccagatcttccgtccggcatctggaccttagccacggcttcgtgttttctctgaacagccgcgtgttcgagacactcaaggatctgaaagtcctgaatcttgcttacaacaagatcaataagatcgccgacgaagcgttttacgggctcgataacctgcaggttctgaatctctcctataacctgcttggagagctgtactctagcaatttctatggcctccctaaagtggcctacattgacctgcagaagaaccatatcgctattatccaagatcagaccttcaaatttctggagaagctgcagacactcgacctgagagataatgccctgaccacgattcacttcatcccctccatccctgacatttttctcagcgggaacaaactggtgacacttcccaagatcaatctgaccgctaacctcattcacctgtctgaaaatcggctggagaaccttgatatcctctatttcctgctgcgcgtcccgcatctccaaattctgatccttaatcagaacagattttccagctgttctggagaccagacaccttccgaaaaccccagcctggagcagctgttcctgggcgaaaatatcctgcaaattgcctgggagaccgagctttgctgggatgtgtttgaagggctctcccatctgcaggttctgtacctcaaccacaattatctgaactctcttcctcccggagtgttcagccacctgaccgccctccggggcctgtcccttaattctaacagacttacagtcctgagccataatgacctccccgctaacctggagatcctcgacatttcccgcaatcagctgcttgcgcctaacccggatgtgtttgttagcctgtctgtgctcgacatcacgcacaataaattcatttgtgaatgcgagctgtccacctttatcaactggctgaatcacacaaacgtcaccattgccgggccccctgctgatatctactgtgtgtaccccgacagcctttctggcgtctccctgttcagcctctctacagaaggatgcgatgaggaggaagtgctcaagagcctgaagttttccctgttcttcgtttgtaccgtgacgcttacactgtttctcatgaccatcctgaccgtcacaaaattccggggcttttgcttcatttgctataagaccgcccagagactggtgtttaaagaccatcctcaagggacagagcccgatatgtacaagtatgacgcctacctttgtttcagctctaaagattttacgtgggttcagaatgctctgctcaagcacctggacacccagtattccgatcagaaccgcttcaacctctgctttgaggaacgggacttcgtgccgggagaaaatagaatcgccaacattcaagatgcgatctggaatagccgcaagattgtctgtctggtgtcccggcattttcttagagacggctggtgcctggaggctttctcttacgcccaggggcgctgtctgagcgacctcaactccgccctgatcatggtggttgtcggctctcttagccagtatcagctgatgaaacaccaatccatccggggattcgtgcagaagcagcaatacctcagatggcctgaggatctgcaggacgtgggctggtttctccacaaactgtctcagcagattcttaagaaagaaaaggagaagaaaaaggggaataacatccccctgcaaacagtcgctaccattagctga

SEQ ID NO: 9634 - protein, 858 aa, synthetic construct [sequence omitted]

SEQ ID NO: 9635 - RNA, 2577 nt, synthetic construct
  misc_feature 1..2577: note = TLR5__Homo_sapiens__AAZ17468
  source 1..2577: mol_type = other RNA
atgggagaccacctggaccttctcctaggagtggtgctcatggccggtcctgtgtttggaattccttcctgctcctttgatggccgaatagccttttatcgtttctgcaacctcacccaggtcccccaggtcctcaacaccactgagaggctcctgctgagcttcaactatatcaggacagtcactgcttcatccttcccctttctggaacagctgcagctgctggagctcgggagccagtatacccccttgactattgacaaggaggccttcagaaacctgcccaaccttagaatcttggacctgggaagtagtaagatatacttcttgcatccagatgcttttcagggactgttccatctgtttgaacttagactgtatttctgtggtctctctgatgctgtattgaaagatggttatttcagaaatttaaaggctttaactcgcttggatctatccaaaaatcagattcgtagcctttaccttcatccttcatttgggaagttgaattccttaaagtccatagatttttcctccaaccaaatattccttgtatgtgaacatgagctcgagcccctacaagggaaaacgctctccttttttagcctcgcagctaatagcttgtatagcagagtctcagtggactggggaaaatgtatgaacccattcagaaacatggtgctggagatactagatgtttctggaaatggctggacagtggacatcacaggaaactttagcaatgccatcagcaaaagccaggccttctctttgattcttgcccaccacatcatgggtgccgggtttggcttccataacatcaaagatcctgaccagaacacatttgctggcctggccagaagttcagtgagacacctggatctttcacatgggtttgtcttctccctgaactcacgagtctttgagacactcaaggatttgaaggttctgaaccttgcctacaacaagataaataagattgcagatgaagcattttacggacttgacaacctccaagttctcaatttgtcatataaccttctgggggaactttacagttcgaatttctatggactacctaaggtagcctacattgatttgcaaaagaatcacattgcaataattcaagaccaaacattcaaattcctggaaaaattacagaccttggatctccgagacaatgctcttacaaccattcattttattccaagcatacccgatatcttcttgagtggcaataaactagtgactttgccaaagatcaaccttacagcgaacctcatccacttatcagaaaacaggctagaaaatctagatattctctactttctcctacgggtacctcatctccagattctcattttaaatcaaaatcgcttctcctcctgtagtggagatcaaaccccttcagagaatcccagcttagaacagcttttccttggagaaaatatgttgcaacttgcctgggaaactgagctctgttgggatgtttttgagggactttctcatcttcaagttctgtatttgaatcataactatcttaattcccttccaccaggagtatttagccatctgactgcattaaggggactaagcctcaactccaacaggctgacagttctttctcacaatgatttacctgctaatttagagatcctggacatatccaggaaccagctcctagctcctaatcctgatgtatttgtatcacttagtgtcttggatataactcataacaagttcatttgtgaatgtgaacttagcacttttatcaattggcttaatcacaccaatgtcactatagctgggcctcctgcagacatatattgtgtgtaccctgactcgctctctggggtttccctcttctctctttccacggaaggttgtgatgaagaggaagtcttaaagtccctaaagttctcccttttcattgtatgcactgtcactctgactctgttcctcatgaccatcctcacagtcacaaagttccggggcttctgttttatctgttataagacagcccagagactggtgttcaaggaccatccccagggcacagaacctgatatgtacaaatatgatgcctatttgtgcttcagcagcaaagacttcacatgggtgcagaatgctttgctcaaacacctggacactcaatacagtgaccaaaacagattcaacctgtgctttgaagaaagagactttgtcccaggagaaaaccgcattgccaatatccaggatgccatctggaacagtagaaagatcgtttgtcttgtgagcagacacttccttagagatggctggtgccttgaagccttcagttatgcccagggcaggtgcttatctgaccttaacagtgctctcatcatggtggtggttgggtccttgtcccagtaccagttgatgaaacatcaatccatcagaggctttgtacagaaacagcagtatttgaggtggcctgaggatctccaggatgttggctggtttcttcataaactctctcaacagatactaaagaaagaaaaagaaaagaagaaagacaataacattccgttgcaaactgtagcaaccatctcctaa

SEQ ID NO: 9636 - RNA, 2577 nt, synthetic construct
  misc_feature 1..2577: note = derived and/or modified sequence opt1 fromTLR5__Homo_sapiens__AAZ17468
  source 1..2577: mol_type = other RNA
atgggcgaccacctggacctcctgctgggggtggtcctcatggccggccccgtgttcgggatcccgagctgctccttcgacggccgcatcgccttctaccggttctgcaacctgacccaggtgccccaggtcctgaacaccacggagcgcctcctgctgagcttcaactacatccggaccgtgaccgcgtccagcttccccttcctcgagcagctgcagctgctcgagctggggtcccagtacacgcccctgaccatcgacaaggaggccttccgcaacctcccgaacctgcggatcctggacctcggcagctccaagatctacttcctgcaccccgacgccttccagggcctgttccacctcttcgagctgcgcctgtacttctgcgggctcagcgacgccgtgctgaaggacggctacttccggaacctgaaggccctcacccgcctggacctgtccaagaaccagatccggagcctctacctgcacccctccttcgggaagctgaacagcctcaagtccatcgacttcagctccaaccagatcttcctggtctgcgagcacgagctggagcccctccagggcaagaccctgagcttcttctccctggcggccaacagcctctactcccgcgtgagcgtggactgggggaagtgcatgaacccgttccggaacatggtcctggagatcctggacgtgagcggcaacggctggaccgtggacatcacggggaacttctccaacgccatcagcaagtcccaggccttcagcctcatcctggcgcaccacatcatgggcgccgggttcggcttccacaacatcaaggaccccgaccagaacaccttcgccggcctggcccgctccagcgtccggcacctcgacctgtcccacgggttcgtgttcagcctgaactcccgcgtgttcgagaccctcaaggacctgaaggtcctgaacctggcctacaacaagatcaacaagatcgcggacgaggccttctacggcctcgacaacctccaggtgctgaacctgagctacaacctgctgggggagctctactccagcaacttctacggcctgcccaaggtggcctacatcgacctgcagaagaaccacatcgccatcatccaggaccagaccttcaagttcctcgagaagctgcagacgctggacctccgggacaacgccctgaccaccatccacttcatcccctccatcccggacatcttcctgagcgggaacaagctcgtcaccctgcccaagatcaacctgacggcgaacctcatccacctgtccgagaaccgcctggagaacctcgacatcctgtacttcctgctccgggtgccccacctccagatcctgatcctgaaccagaaccgcttcagctcctgcagcggcgaccagaccccctccgagaacccgagcctggagcagctgttcctcggcgagaacatgctgcagctggcctgggagaccgagctctgctgggacgtgttcgaggggctgagccacctccaggtcctgtacctgaaccacaactacctgaactccctcccgcccggcgtgttcagccacctgaccgccctgcgggggctctccctgaacagcaaccgcctgacggtgctctcccacaacgacctgcccgccaacctggagatcctcgacatcagccggaaccagctgctggcccccaaccccgacgtcttcgtgtccctcagcgtcctggacatcacccacaacaagttcatctgcgagtgcgagctgtccaccttcatcaactggctcaaccacaccaacgtgacgatcgcgggcccgcccgccgacatctactgcgtgtaccccgacagcctgtccggggtcagcctgttctccctcagcaccgagggctgcgacgaggaggaggtgctgaagtccctgaagttcagcctcttcatcgtgtgcaccgtcaccctgacgctgttcctcatgaccatcctgaccgtgaccaagttccgcggcttctgcttcatctgctacaagacggcccagcgcctggtgttcaaggaccacccccaggggaccgagcccgacatgtacaagtacgacgcctacctctgcttctccagcaaggacttcacctgggtccagaacgccctgctgaagcacctcgacacccagtacagcgaccagaaccggttcaacctgtgcttcgaggagcgcgacttcgtgcccggcgagaaccggatcgcgaacatccaggacgccatctggaactcccgcaagatcgtgtgcctggtcagccggcacttcctccgcgacgggtggtgcctggaggccttctcctacgcccagggccggtgcctgagcgacctcaactccgcgctgatcatggtggtggtcgggagcctgtcccagtaccagctcatgaagcaccagagcatccgcggcttcgtgcagaagcagcagtacctgcggtggccggaggacctgcaggacgtgggctggttcctccacaagctgtcccagcagatcctgaagaaggagaaggagaagaagaaggacaacaacatccccctccagacggtcgccaccatcagctga

SEQ ID NO: 9637 - RNA, 2577 nt, synthetic construct
  misc_feature 1..2577: note = derived and/or modified sequence opt2 fromTLR5__Homo_sapiens__AAZ17468
  source 1..2577: mol_type = other RNA
atgggcgaccacctcgacctcctcctcggcgtcgtcctcatggccggccccgtcttcggcatcccctcctgctccttcgacggccgcatcgccttctaccgcttctgcaacctcacccaggtcccccaggtcctcaacaccaccgagcgcctcctcctctccttcaactacatccgcaccgtcaccgcctcctccttccccttcctcgagcagctccagctcctcgagctcggctcccagtacacccccctcaccatcgacaaggaggccttccgcaacctccccaacctccgcatcctcgacctcggctcctccaagatctacttcctccaccccgacgccttccagggcctcttccacctcttcgagctccgcctctacttctgcggcctctccgacgccgtcctcaaggacggctacttccgcaacctcaaggccctcacccgcctcgacctctccaagaaccagatccgctccctctacctccacccctccttcggcaagctcaactccctcaagtccatcgacttctcctccaaccagatcttcctcgtctgcgagcacgagctcgagcccctccagggcaagaccctctccttcttctccctcgccgccaactccctctactcccgcgtctccgtcgactggggcaagtgcatgaaccccttccgcaacatggtcctcgagatcctcgacgtctccggcaacggctggaccgtcgacatcaccggcaacttctccaacgccatctccaagtcccaggccttctccctcatcctcgcccaccacatcatgggcgccggcttcggcttccacaacatcaaggaccccgaccagaacaccttcgccggcctcgcccgctcctccgtccgccacctcgacctctcccacggcttcgtcttctccctcaactcccgcgtcttcgagaccctcaaggacctcaaggtcctcaacctcgcctacaacaagatcaacaagatcgccgacgaggccttctacggcctcgacaacctccaggtcctcaacctctcctacaacctcctcggcgagctctactcctccaacttctacggcctccccaaggtcgcctacatcgacctccagaagaaccacatcgccatcatccaggaccagaccttcaagttcctcgagaagctccagaccctcgacctccgcgacaacgccctcaccaccatccacttcatcccctccatccccgacatcttcctctccggcaacaagctcgtcaccctccccaagatcaacctcaccgccaacctcatccacctctccgagaaccgcctcgagaacctcgacatcctctacttcctcctccgcgtcccccacctccagatcctcatcctcaaccagaaccgcttctcctcctgctccggcgaccagaccccctccgagaacccctccctcgagcagctcttcctcggcgagaacatgctccagctcgcctgggagaccgagctctgctgggacgtcttcgagggcctctcccacctccaggtcctctacctcaaccacaactacctcaactccctcccccccggcgtcttctcccacctcaccgccctccgcggcctctccctcaactccaaccgcctcaccgtcctctcccacaacgacctccccgccaacctcgagatcctcgacatctcccgcaaccagctcctcgcccccaaccccgacgtcttcgtctccctctccgtcctcgacatcacccacaacaagttcatctgcgagtgcgagctctccaccttcatcaactggctcaaccacaccaacgtcaccatcgccggcccccccgccgacatctactgcgtctaccccgactccctctccggcgtctccctcttctccctctccaccgagggctgcgacgaggaggaggtcctcaagtccctcaagttctccctcttcatcgtctgcaccgtcaccctcaccctcttcctcatgaccatcctcaccgtcaccaagttccgcggcttctgcttcatctgctacaagaccgcccagcgcctcgtcttcaaggaccacccccagggcaccgagcccgacatgtacaagtacgacgcctacctctgcttctcctccaaggacttcacctgggtccagaacgccctcctcaagcacctcgacacccagtactccgaccagaaccgcttcaacctctgcttcgaggagcgcgacttcgtccccggcgagaaccgcatcgccaacatccaggacgccatctggaactcccgcaagatcgtctgcctcgtctcccgccacttcctccgcgacggctggtgcctcgaggccttctcctacgcccagggccgctgcctctccgacctcaactccgccctcatcatggtcgtcgtcggctccctctcccagtaccagctcatgaagcaccagtccatccgcggcttcgtccagaagcagcagtacctccgctggcccgaggacctccaggacgtcggctggttcctccacaagctctcccagcagatcctcaagaaggagaaggagaagaagaaggacaacaacatccccctccagaccgtcgccaccatctcctga

SEQ ID NO: 9638 - RNA, 2577 nt, synthetic construct
  misc_feature 1..2577: note = derived and/or modified sequence opt3 fromTLR5__Homo_sapiens__AAZ17468
  source 1..2577: mol_type = other RNA
atgggcgaccacctggatctccttctgggggtggtcttgatggccggacccgttttcggtatccctagctgctcctttgacggcagaattgctttctacaggttttgtaacttaacccaggtgccacaagtactgaatacaactgagcggctactcctgtctttcaactatatacgcacggtgaccgcatcaagttttccgttccttgaacagctgcagttgctcgagctggggagccagtacacacccctgactatcgataaggaagcctttcgaaatctccctaacttacgtattctggaccttggatcctctaaaatctatttcttgcatccagatgcgtttcaaggcctgttccacctatttgagctcagactgtacttctgcggtctttcggacgctgtcctgaaggatgggtattttaggaatttgaaagccctcacccggctggacttatcaaagaaccagattcgcagcctgtacctccatcccagtttcggaaaacttaattccctgaagtctatcgatttcagctccaaccagatatttttggtgtgtgaacacgagctagagcctctgcagggcaagacactctcattctttagtctggcagccaatagcctttattctagagtttccgtggactggggcaaatgcatgaacccattcaggaatatggtcctggaaatcttggatgtgtcagggaacggatggaccgtagacattactggtaattttagcaacgctatcagtaagtctcaagcattctccctcattctggcccatcacatcatgggcgctgggtttggattccacaatataaaagatcccgaccagaacacatttgccggcttagcgcggagctcggttcgccatctggacctatctcacggtttcgtgttttccctcaactcacgagtcttcgagaccctgaaggatcttaaagtgttgaatctggcatacaacaagattaataagatcgccgacgaggctttttacgggctcgataacctgcaagtgcttaatctgagttataacttgctcggagaactgtacagctccaatttctatggcttacctaaagtcgcctacattgacctgcagaagaaccatatcgcaatcattcaggatcagacgttcaaatttctagagaagctccagactctggaccttagagataatgctttgaccacaatacacttcatcccatctattccggacatctttctgagcggcaacaaactcgttactctgcccaagataaatttaaccgccaacctgattcacctttcagaaaataggttggagaacctcgatatcctgtatttcctactgcgggtgcctcatctccaaatcctgattcttaatcagaaccgttttagttcctgtagcggggaccagacaccatctgaaaacccctcattggagcagctgttcttaggagaaaatatgctccaactggcgtgggagaccgagctttgctgggatgtatttgaaggtctgagtcacctccaggtgttgtacctgaaccataattatctaaacagcctgcctccaggcgtcttctcccacctcacggccctgcgcgggctttctttgaactcgaatagactgactgtgttaagccataatgacctccccgcaaacctggagatccttgacatttccaggaatcagctgctagctccgaaccctgatgtttttgtgtcactcagtgtcctggacataacacacaataaattcatctgtgaatgcgagttgtctacctttattaactggctgaatcacactaacgtgacaatcgccggacccccagctgatatctactgtgtataccctgacagcttatccggcgtttcactcttcagcctgtctaccgaaggttgcgatgaggaggaagtgcttaagtccctgaagtttagtttgttcattgtctgtacggtgaccctcacactgttcctaatgactatactgaccgtcacaaaatttcgggggttctgctttatctgctataagactgcccagcgacttgtgttcaaagaccatccccaaggcaccgagccagatatgtacaagtatgacgcatacctctgttttagctctaaagatttcacatgggttcagaatgccctgttgaagcacctggacacccagtattccgatcagaaccgctttaacttatgcttcgaagagagagactttgtgcccggagaaaataggattgctaacatccaagatgcgatttggaatagtcggaagatcgtatgtctcgtctcacgccatttcctgagagacggctggtgccttgaggcatttagctacgcccaggggaggtgtctgtcggacttgaactccgctctcataatggtggttgtgggatctctgagccagtatcagctaatgaaacaccaatcaatccgtggtttcgtccagaagcagcaatacctgcggtggcctgaggatcttcaggacgtgggctggttcctccacaaactgagtcagcagattttgaagaaagaaaaggagaagaaaaaggataataacatcccattacaaactgtagccacgatttcctga

SEQ ID NO: 9639 - RNA, 2577 nt, synthetic construct
  misc_feature 1..2577: note = derived and/or modified sequence opt4 fromTLR5__Homo_sapiens__AAZ17468
  source 1..2577: mol_type = other RNA
atgggcgaccacctggacctgctgctgggcgtggtgctgatggccggccccgtgttcggcatccccagctgcagcttcgacggcagaatcgccttctacagattctgcaacctgacccaggtgccccaggtgctgaacaccaccgagagactgctgctgagcttcaactacatcagaaccgtgaccgccagcagcttccccttcctggagcagctgcagctgctggagctgggcagccagtacacccccctgaccatcgacaaggaggccttcagaaacctgcccaacctgagaatcctggacctgggcagcagcaagatctacttcctgcaccccgacgccttccagggcctgttccacctgttcgagctgagactgtacttctgcggcctgagcgacgccgtgctgaaggacggctacttcagaaacctgaaggccctgaccagactggacctgagcaagaaccagatcagaagcctgtacctgcaccccagcttcggcaagctgaacagcctgaagagcatcgacttcagcagcaaccagatcttcctggtgtgcgagcacgagctggagcccctgcagggcaagaccctgagcttcttcagcctggccgccaacagcctgtacagcagagtgagcgtggactggggcaagtgcatgaaccccttcagaaacatggtgctggagatcctggacgtgagcggcaacggctggaccgtggacatcaccggcaacttcagcaacgccatcagcaagagccaggccttcagcctgatcctggcccaccacatcatgggcgccggcttcggcttccacaacatcaaggaccccgaccagaacaccttcgccggcctggccagaagcagcgtgagacacctggacctgagccacggcttcgtgttcagcctgaacagcagagtgttcgagaccctgaaggacctgaaggtgctgaacctggcctacaacaagatcaacaagatcgccgacgaggccttctacggcctggacaacctgcaggtgctgaacctgagctacaacctgctgggcgagctgtacagcagcaacttctacggcctgcccaaggtggcctacatcgacctgcagaagaaccacatcgccatcatccaggaccagaccttcaagttcctggagaagctgcagaccctggacctgagagacaacgccctgaccaccatccacttcatccccagcatccccgacatcttcctgagcggcaacaagctggtgaccctgcccaagatcaacctgaccgccaacctgatccacctgagcgagaacagactggagaacctggacatcctgtacttcctgctgagagtgccccacctgcagatcctgatcctgaaccagaacagattcagcagctgcagcggcgaccagacccccagcgagaaccccagcctggagcagctgttcctgggcgagaacatgctgcagctggcctgggagaccgagctgtgctgggacgtgttcgagggcctgagccacctgcaggtgctgtacctgaaccacaactacctgaacagcctgccccccggcgtgttcagccacctgaccgccctgagaggcctgagcctgaacagcaacagactgaccgtgctgagccacaacgacctgcccgccaacctggagatcctggacatcagcagaaaccagctgctggcccccaaccccgacgtgttcgtgagcctgagcgtgctggacatcacccacaacaagttcatctgcgagtgcgagctgagcaccttcatcaactggctgaaccacaccaacgtgaccatcgccggcccccccgccgacatctactgcgtgtaccccgacagcctgagcggcgtgagcctgttcagcctgagcaccgagggctgcgacgaggaggaggtgctgaagagcctgaagttcagcctgttcatcgtgtgcaccgtgaccctgaccctgttcctgatgaccatcctgaccgtgaccaagttcagaggcttctgcttcatctgctacaagaccgcccagagactggtgttcaaggaccacccccagggcaccgagcccgacatgtacaagtacgacgcctacctgtgcttcagcagcaaggacttcacctgggtgcagaacgccctgctgaagcacctggacacccagtacagcgaccagaacagattcaacctgtgcttcgaggagagagacttcgtgcccggcgagaacagaatcgccaacatccaggacgccatctggaacagcagaaagatcgtgtgcctggtgagcagacacttcctgagagacggctggtgcctggaggccttcagctacgcccagggcagatgcctgagcgacctgaacagcgccctgatcatggtggtggtgggcagcctgagccagtaccagctgatgaagcaccagagcatcagaggcttcgtgcagaagcagcagtacctgagatggcccgaggacctgcaggacgtgggctggttcctgcacaagctgagccagcagatcctgaagaaggagaaggagaagaagaaggacaacaacatccccctgcagaccgtggccaccatcagctga

SEQ ID NO: 9640 - RNA, 2577 nt, synthetic construct
  misc_feature 1..2577: note = derived and/or modified sequence opt5 fromTLR5__Homo_sapiens__AAZ17468
  source 1..2577: mol_type = other RNA
atgggcgaccacctggatctcctgcttggggtggtcctgatggccggacccgttttcggcatccctagctgctcctttgacgggagaattgctttctaccggttttgtaacctcacccaggtgccgcaagtgctgaatacaacggagcgccttctgctctctttcaactatatcagaaccgtcacagccagctcctttcccttcctggaacagctgcagctcctggagcttggatctcagtacacccctctgacaattgataaggaagcgtttcggaatctccccaacctgcgcatccttgacctgggcagctccaaaatttatttcctccatcctgatgcttttcaagggctgttccacctgtttgagctcagactgtacttctgcggactttctgacgccgtgctgaaggatggctattttcggaatctcaaagccctgacccgccttgacctgagcaagaaccagatcagatccctctacctgcatcccagcttcggcaaactcaattctctcaagtccatcgatttcagctctaaccagatttttctggtttgtgaacacgagcttgagcctctgcaggggaagacactctccttctttagcctggctgccaattctctttattcccgggtgagcgtcgactggggaaaatgcatgaacccgttccgcaatatggtgctggaaatcctcgatgtttccggcaacgggtggaccgtggacattacgggaaatttttctaacgctatcagcaagtcccaagccttcagcctgattctggcgcatcacatcatgggcgccgggtttggattccacaatattaaagatcccgaccagaacacctttgctggcctcgccagatcttccgtccggcatctggaccttagccacggcttcgtgttttctctgaacagccgcgtgttcgagacactcaaggatctgaaagtcctgaatcttgcttacaacaagatcaataagatcgccgacgaagcgttttacgggctcgataacctgcaggttctgaatctctcctataacctgcttggagagctgtactctagcaatttctatggcctccctaaagtggcctacattgacctgcagaagaaccatatcgctattatccaagatcagaccttcaaatttctggagaagctgcagacactcgacctgagagataatgccctgaccacgattcacttcatcccctccatccctgacatttttctcagcgggaacaaactggtgacacttcccaagatcaatctgaccgctaacctcattcacctgtctgaaaatcggctggagaaccttgatatcctctatttcctgctgcgcgtcccgcatctccaaattctgatccttaatcagaacagattttccagctgttctggagaccagacaccttccgaaaaccccagcctggagcagctgttcctgggcgaaaatatgctgcaacttgcctgggagaccgagctctgctgggatgtgtttgaagggctgtcccaccttcaggttctctacctgaaccataattatcttaactctctgcctcccggagtgttcagccacctcaccgccctgcggggcctgtcccttaattctaacagactgacagtcctcagccataatgacctgcccgctaacctcgagatcctggacatttcccgcaatcagcttctggcgcctaacccggatgtgtttgttagcctctctgtgctggacatcacgcacaataaattcatttgtgaatgcgagctgtccacctttatcaactggcttaatcacacaaacgtcaccattgccgggccccctgctgatatctactgtgtgtaccccgacagcctgtctggcgtctccctcttcagcctgtctacagaaggatgcgatgaggaggaagtgctcaagagcctgaagttttcccttttcattgtttgtaccgtgacgctgacactcttcctgatgaccatcctgaccgtcacaaaatttcggggcttctgctttatctgctataagaccgcccagagacttgtgttcaaagaccatcctcaagggacagagcccgatatgtacaagtatgacgcctacctgtgttttagctctaaagatttcacgtgggttcagaatgctctcctgaagcacctcgacacccagtattccgatcagaaccgctttaacctgtgcttcgaggaacgggactttgtgccgggagaaaatagaattgccaacatccaagatgcgatttggaatagccgcaagatcgtctgtcttgtgtcccggcatttcctgagagacggctggtgcctggaggctttttcttacgcccaggggcgctgtctcagcgacctgaactccgcccttattatggtggttgtcggctctctgagccagtatcagctcatgaaacaccaatccatccggggattcgtgcagaagcagcaatacctgagatggcctgaggatctccaggacgtgggctggttcctgcacaaactttctcagcagatcctgaagaaagaaaaggagaagaaaaaggataataacattcccctgcaaacagtcgctaccatcagctga

SEQ ID NO: 9641 - protein, 858 aa, synthetic construct [sequence omitted]

SEQ ID NO: 9642 - RNA, 2577 nt, synthetic construct
  misc_feature 1..2577: note = TLR5__Homo_sapiens__AAZ17470
  source 1..2577: mol_type = other RNA
atgggagaccacctggaccttctcctaggagtggtgctcatggccggtcctgtgtttggaattccttcctgctcctttgatggccgaatagccttttatcgtttctgcaacctcacccaggtcccccaggtcctcaacaccactgagaggctcctgctgagcttcaactatatcaggacagtcactgcttcatccttcccctttctggaacagctgcagctgctggagctcgggagccagtatacccccttgactattgacaaggaggccttcagaaacctgcccaaccttagaatcttggacctgggaagtagtaagatatacttcttgcatccagatgcttttcagggactgttccatctgtttgaacttagactgtatttctgtggtctctctgatgctgtattgaaagatggttatttcagaactttaaaggctttaactcgcttggatctatccaaaaatcagattcgtagcctttaccttcatccttcatttgggaagttgaattccttaaagtccatagatttttcctccaaccaaatattccttgtatgtgaacatgagctcgagcccctacaagggaaaacgctctccttttttagcctcgcagctaatagcttgtatagcagagtctcagtggactggggaaaatgtatgaacccattcagaaacatggtgctggagatactagatgtttctggaaatggctggacagtggacatcacaggaaactttagcaatgccatcagcaaaagccaggccttctctttgattcttgcccaccacatcatgggtgccgggtttggcttccataacatcaaagatcctgaccagaacacatttgctggcctggccagaagttcagtgagacacctggatctttcacatgggtttgtcttctccctgaactcacgagtctttgagacactcaaggatttgaaggttctgaaccttgcctacaacaagataaataagattgcagatgaagcattttacggacttgacaacctccaagttctcaatttgtcatataaccttctgggggaactttacagttcgaatttctatggactacctaaggtagcctacattgatttgcaaaagaatcacattgcaataattcaagaccaaacattcaaattcctggaaaaattacagaccttggatctccgagacaatgctcttacaaccattcattttattccaagcatacccgatatcttcttgagtggcaataaactagtgactttgccaaagatcaaccttacagcgaacctcatccacttatcagaaaacaggctagaaaatctagatattctctactttctcctacgggtacctcatctccagattctcattttaaatcaaaatcgcttctcctcctgtagtggagatcaaaccccttcagagaatcccagcttagaacagcttttccttggagaaaatatgttgcaacttgcctgggaaactgagctctgttgggatgtttttgagggactttctcatcttcaagttctgtatttgaatcataactatcttaattcccttccaccaggagtatttagccatctgactgcattaaggggactaagcctcaactccaacaggctgacagttctttctcacaatgatttacctgctaatttagagatcctggacatatccaggaaccagctcctagctcctaatcctgatgtatttgtatcacttagtgtcttggatataactcataacaagttcatttgtgaatgtgaacttagcacttttatcaattggcttaatcacaccaatgtcactatagctgggcctcctgcagacatatattgtgtgtaccctgactcgttctctggggtttccctcttctctctttccacggaaggttgtgatgaagaggaagtcttaaagtccctaaagttctcccttttctttgtatgcactgtcactctgactctgttcctcatgaccatcctcacagtcacaaagttccggggcttctgttttatctgttataagacagcccagagactggtgttcaaggaccatccccagggcacagaacctgatatgtacaaatatgatgcctatttgtgcttcagcagcaaagacttcacatgggtgcagaatgctttgctcaaacacctggacactcaatacagtgaccaaaacagattcaacctgtgctttgaagaaagagactttgtcccaggagaaaaccgcattgccaatatccaggatgccatctggaacagtagaaagatcgtttgtcttgtgagcagacacttccttagagatggctggtgccttgaagccttcagttatgcccagggcaggtgcttatctgaccttaacagtgctctcatcatggtggtggttgggtccttgtcccagtaccagttgatgaaacatcaatccatcagaggctttgtacagaaacagcagtatttgaggtggcctgaggatctccaggatgttggctggtttcttcataaactctctcaacagatactaaagaaagaaaaagaaaagaagaaagacaataacattccgttgcaaactgtagcaaccatctcctaa

SEQ ID NO: 9643 - RNA, 2577 nt, synthetic construct
  misc_feature 1..2577: note = derived and/or modified sequence opt1 fromTLR5__Homo_sapiens__AAZ17470
  source 1..2577: mol_type = other RNA
atgggcgaccacctggacctcctgctgggggtggtcctcatggccggccccgtgttcgggatcccgagctgctccttcgacggccgcatcgccttctaccggttctgcaacctgacccaggtgccccaggtcctgaacaccacggagcgcctcctgctgagcttcaactacatccggaccgtgaccgcgtccagcttccccttcctcgagcagctgcagctgctcgagctggggtcccagtacacgcccctgaccatcgacaaggaggccttccgcaacctcccgaacctgcggatcctggacctcggcagctccaagatctacttcctgcaccccgacgccttccagggcctgttccacctcttcgagctgcgcctgtacttctgcgggctcagcgacgccgtgctgaaggacggctacttccggaccctgaaggccctcacccgcctggacctgtccaagaaccagatccggagcctctacctgcacccctccttcgggaagctgaacagcctcaagtccatcgacttcagctccaaccagatcttcctggtctgcgagcacgagctggagcccctccagggcaagaccctgagcttcttctccctggcggccaacagcctctactcccgcgtgagcgtggactgggggaagtgcatgaacccgttccggaacatggtcctggagatcctggacgtgagcggcaacggctggacggtggacatcaccgggaacttctccaacgccatcagcaagtcccaggccttcagcctcatcctggcgcaccacatcatgggcgccgggttcggcttccacaacatcaaggaccccgaccagaacaccttcgccggcctggcccgctccagcgtccggcacctcgacctgtcccacgggttcgtgttcagcctgaactcccgcgtgttcgagaccctcaaggacctgaaggtcctgaacctggcctacaacaagatcaacaagatcgcggacgaggccttctacggcctcgacaacctccaggtgctgaacctgagctacaacctgctgggggagctctactccagcaacttctacggcctgcccaaggtggcctacatcgacctgcagaagaaccacatcgccatcatccaggaccagacgttcaagttcctcgagaagctgcagaccctggacctccgggacaacgccctgaccaccatccacttcatcccctccatcccggacatcttcctgagcgggaacaagctcgtcacgctgcccaagatcaacctgaccgcgaacctcatccacctgtccgagaaccgcctggagaacctcgacatcctgtacttcctgctccgggtgccccacctccagatcctgatcctgaaccagaaccgcttcagctcctgcagcggcgaccagaccccctccgagaacccgagcctggagcagctgttcctcggcgagaacatgctgcagctggcctgggagaccgagctctgctgggacgtgttcgaggggctgagccacctccaggtcctgtacctgaaccacaactacctgaactccctcccgcccggcgtgttcagccacctgacggccctgcgggggctctccctgaacagcaaccgcctgaccgtgctctcccacaacgacctgcccgccaacctggagatcctcgacatcagccggaaccagctgctggcccccaaccccgacgtcttcgtgtccctcagcgtcctggacatcacccacaacaagttcatctgcgagtgcgagctgtccaccttcatcaactggctcaaccacacgaacgtgaccatcgcgggcccgcccgccgacatctactgcgtgtaccccgacagcttctccggggtcagcctgttctccctgagcaccgagggctgcgacgaggaggaggtgctcaagtccctgaagttcagcctgttcttcgtgtgcaccgtcacgctcaccctgttcctgatgaccatcctcaccgtgacgaagttccgcggcttctgcttcatctgctacaagaccgcccagcgcctggtgttcaaggaccacccccaggggaccgagcccgacatgtacaagtacgacgcctacctgtgcttctccagcaaggacttcacctgggtccagaacgccctcctgaagcacctggacacgcagtacagcgaccagaaccggttcaacctctgcttcgaggagcgcgacttcgtgcccggcgagaaccggatcgcgaacatccaggacgccatctggaactcccgcaagatcgtgtgcctggtcagccggcacttcctgcgcgacgggtggtgcctcgaggccttctcctacgcccagggccggtgcctgagcgacctgaactccgcgctcatcatggtggtggtcgggagcctgtcccagtaccagctgatgaagcaccagagcatccgcggcttcgtgcagaagcagcagtacctccggtggccggaggacctgcaggacgtgggctggttcctgcacaagctctcccagcagatcctgaagaaggagaaggagaagaagaaggacaacaacatccccctgcagaccgtcgccaccatcagctga

SEQ ID NO: 9644 - RNA, 2577 nt, synthetic construct
  misc_feature 1..2577: note = derived and/or modified sequence opt2 fromTLR5__Homo_sapiens__AAZ17470
  source 1..2577: mol_type = other RNA
atgggcgaccacctcgacctcctcctcggcgtcgtcctcatggccggccccgtcttcggcatcccctcctgctccttcgacggccgcatcgccttctaccgcttctgcaacctcacccaggtcccccaggtcctcaacaccaccgagcgcctcctcctctccttcaactacatccgcaccgtcaccgcctcctccttccccttcctcgagcagctccagctcctcgagctcggctcccagtacacccccctcaccatcgacaaggaggccttccgcaacctccccaacctccgcatcctcgacctcggctcctccaagatctacttcctccaccccgacgccttccagggcctcttccacctcttcgagctccgcctctacttctgcggcctctccgacgccgtcctcaaggacggctacttccgcaccctcaaggccctcacccgcctcgacctctccaagaaccagatccgctccctctacctccacccctccttcggcaagctcaactccctcaagtccatcgacttctcctccaaccagatcttcctcgtctgcgagcacgagctcgagcccctccagggcaagaccctctccttcttctccctcgccgccaactccctctactcccgcgtctccgtcgactggggcaagtgcatgaaccccttccgcaacatggtcctcgagatcctcgacgtctccggcaacggctggaccgtcgacatcaccggcaacttctccaacgccatctccaagtcccaggccttctccctcatcctcgcccaccacatcatgggcgccggcttcggcttccacaacatcaaggaccccgaccagaacaccttcgccggcctcgcccgctcctccgtccgccacctcgacctctcccacggcttcgtcttctccctcaactcccgcgtcttcgagaccctcaaggacctcaaggtcctcaacctcgcctacaacaagatcaacaagatcgccgacgaggccttctacggcctcgacaacctccaggtcctcaacctctcctacaacctcctcggcgagctctactcctccaacttctacggcctccccaaggtcgcctacatcgacctccagaagaaccacatcgccatcatccaggaccagaccttcaagttcctcgagaagctccagaccctcgacctccgcgacaacgccctcaccaccatccacttcatcccctccatccccgacatcttcctctccggcaacaagctcgtcaccctccccaagatcaacctcaccgccaacctcatccacctctccgagaaccgcctcgagaacctcgacatcctctacttcctcctccgcgtcccccacctccagatcctcatcctcaaccagaaccgcttctcctcctgctccggcgaccagaccccctccgagaacccctccctcgagcagctcttcctcggcgagaacatgctccagctcgcctgggagaccgagctctgctgggacgtcttcgagggcctctcccacctccaggtcctctacctcaaccacaactacctcaactccctcccccccggcgtcttctcccacctcaccgccctccgcggcctctccctcaactccaaccgcctcaccgtcctctcccacaacgacctccccgccaacctcgagatcctcgacatctcccgcaaccagctcctcgcccccaaccccgacgtcttcgtctccctctccgtcctcgacatcacccacaacaagttcatctgcgagtgcgagctctccaccttcatcaactggctcaaccacaccaacgtcaccatcgccggcccccccgccgacatctactgcgtctaccccgactccttctccggcgtctccctcttctccctctccaccgagggctgcgacgaggaggaggtcctcaagtccctcaagttctccctcttcttcgtctgcaccgtcaccctcaccctcttcctcatgaccatcctcaccgtcaccaagttccgcggcttctgcttcatctgctacaagaccgcccagcgcctcgtcttcaaggaccacccccagggcaccgagcccgacatgtacaagtacgacgcctacctctgcttctcctccaaggacttcacctgggtccagaacgccctcctcaagcacctcgacacccagtactccgaccagaaccgcttcaacctctgcttcgaggagcgcgacttcgtccccggcgagaaccgcatcgccaacatccaggacgccatctggaactcccgcaagatcgtctgcctcgtctcccgccacttcctccgcgacggctggtgcctcgaggccttctcctacgcccagggccgctgcctctccgacctcaactccgccctcatcatggtcgtcgtcggctccctctcccagtaccagctcatgaagcaccagtccatccgcggcttcgtccagaagcagcagtacctccgctggcccgaggacctccaggacgtcggctggttcctccacaagctctcccagcagatcctcaagaaggagaaggagaagaagaaggacaacaacatccccctccagaccgtcgccaccatctcctga

SEQ ID NO: 9645 - RNA, 2577 nt, synthetic construct
  misc_feature 1..2577: note = derived and/or modified sequence opt3 fromTLR5__Homo_sapiens__AAZ17470
  source 1..2577: mol_type = other RNA
atgggcgaccacctggatctccttctgggggtggtcttgatggccggacccgttttcggtatccctagctgctcctttgacggcagaattgctttctacaggttttgtaacttaacccaggtgccacaagtactgaatacaactgagcggctactcctgtctttcaactatatacgcacggtgaccgcatcaagttttccgttccttgaacagctgcagttgctcgagctggggagccagtacacacccctgactatcgataaggaagcctttcgaaatctccctaacttacgtattctggaccttggatcctctaaaatctatttcttgcatccagatgcgtttcaaggcctgttccacctatttgagctcagactgtacttctgcggtctttcggacgctgtcctgaaggatgggtattttaggaccttgaaagccctcacacggctggacttatcaaagaatcagattcgcagcctgtacctccatcccagtttcggaaaacttaactccctgaagtctatcgatttcagctccaatcagatatttttggtgtgtgaacacgagctagagcctctgcagggcaagaccctctcattctttagtctggcagccaacagcctttattctagagtttccgtggactggggcaaatgcatgaatccattcaggaacatggtcctggaaatcttggatgtgtcagggaatggatggactgtagacattacaggtaactttagcaatgctatcagtaagtctcaagcattctccctcattctggcccatcacatcatgggcgctgggtttggattccacaacataaaagatcccgaccagaatacctttgccggcttagcgcggagctcggttcgccatctggacctatctcacggtttcgtgttttccctcaactcacgagtcttcgagacgctgaaggatcttaaagtgttgaacctggcatacaataagattaacaagatcgccgacgaggctttttacgggctcgataatctgcaagtgcttaacctgagttataatttgctcggagaactgtacagctccaacttctatggcttacctaaagtcgcctacattgacctgcagaagaatcatatcgcaatcattcaggatcagactttcaaatttctagagaagctccagaccctggaccttagagataacgctttgacaactatacacttcatcccatctattccggacatctttctgagcggcaataaactcgttaccctgcccaagataaacttaacagccaatctgattcacctttcagaaaacaggttggagaatctcgatatcctgtatttcctactgcgggtgcctcatctccaaatcctgattcttaaccagaatcgttttagttcctgtagcggggaccagaccccatctgaaaacccctcattggagcagctgttcttaggagaaaacatgctccaactggcgtgggagacggagctttgctgggatgtatttgaaggtctgagtcacctccaggtgttgtacctgaatcataactatctaaatagcctgcctccaggcgtcttctcccacctcactgccctgcgcgggctttctttgaactcgaatagactgacagtgttaagccataacgacctccccgcaaatctggagatccttgacatttccaggaaccagctgctagctccgaatcctgatgtttttgtgtcactcagtgtcctggacataacccacaacaaattcatctgtgaatgcgagttgtctacttttattaattggctgaaccacacaaatgtgaccatcgccggacccccagctgatatctactgtgtataccctgacagcttctccggcgtttcattatttagcctctctacggaaggttgcgatgaggaggaagtgctgaagtcccttaagttcagtctgttctttgtctgtaccgtgacattgactctcttcctgatgaccattctaacagtcactaaatttcgggggttctgctttatatgctataagaccgcccagcgactggtgttcaaagaccatccccaaggcacagagccagatatgtacaagtatgacgcatacctttgttttagctctaaagatttcacctgggttcagaacgccctcctgaagcacttggacactcagtattccgatcagaatcgctttaacctgtgcttcgaagagagagactttgtgcccggagaaaacaggatcgctaatattcaagatgcgatctggaactcacggaagattgtatgtttagtcagtcgccatttcctcagagacggctggtgcctggaggcattcagctacgcccaggggaggtgtctttcggacctgaactccgctttgatcatggtggttgtgggatctctcagccagtatcagctgatgaaacaccaatcaatacgtggttttgtccagaagcagcaatacctacggtggcctgaggatctgcaggacgtgggctggttccttcacaaactcagtcagcagatcctgaagaaagaaaaggagaagaaaaaggataataatattccattgcaaacggtagccacaatctcctga

SEQ ID NO: 9646 - RNA, 2577 nt, synthetic construct
  misc_feature 1..2577: note = derived and/or modified sequence opt4 fromTLR5__Homo_sapiens__AAZ17470
  source 1..2577: mol_type = other RNA
atgggcgaccacctggacctgctgctgggcgtggtgctgatggccggccccgtgttcggcatccccagctgcagcttcgacggcagaatcgccttctacagattctgcaacctgacccaggtgccccaggtgctgaacaccaccgagagactgctgctgagcttcaactacatcagaaccgtgaccgccagcagcttccccttcctggagcagctgcagctgctggagctgggcagccagtacacccccctgaccatcgacaaggaggccttcagaaacctgcccaacctgagaatcctggacctgggcagcagcaagatctacttcctgcaccccgacgccttccagggcctgttccacctgttcgagctgagactgtacttctgcggcctgagcgacgccgtgctgaaggacggctacttcagaaccctgaaggccctgaccagactggacctgagcaagaaccagatcagaagcctgtacctgcaccccagcttcggcaagctgaacagcctgaagagcatcgacttcagcagcaaccagatcttcctggtgtgcgagcacgagctggagcccctgcagggcaagaccctgagcttcttcagcctggccgccaacagcctgtacagcagagtgagcgtggactggggcaagtgcatgaaccccttcagaaacatggtgctggagatcctggacgtgagcggcaacggctggaccgtggacatcaccggcaacttcagcaacgccatcagcaagagccaggccttcagcctgatcctggcccaccacatcatgggcgccggcttcggcttccacaacatcaaggaccccgaccagaacaccttcgccggcctggccagaagcagcgtgagacacctggacctgagccacggcttcgtgttcagcctgaacagcagagtgttcgagaccctgaaggacctgaaggtgctgaacctggcctacaacaagatcaacaagatcgccgacgaggccttctacggcctggacaacctgcaggtgctgaacctgagctacaacctgctgggcgagctgtacagcagcaacttctacggcctgcccaaggtggcctacatcgacctgcagaagaaccacatcgccatcatccaggaccagaccttcaagttcctggagaagctgcagaccctggacctgagagacaacgccctgaccaccatccacttcatccccagcatccccgacatcttcctgagcggcaacaagctggtgaccctgcccaagatcaacctgaccgccaacctgatccacctgagcgagaacagactggagaacctggacatcctgtacttcctgctgagagtgccccacctgcagatcctgatcctgaaccagaacagattcagcagctgcagcggcgaccagacccccagcgagaaccccagcctggagcagctgttcctgggcgagaacatgctgcagctggcctgggagaccgagctgtgctgggacgtgttcgagggcctgagccacctgcaggtgctgtacctgaaccacaactacctgaacagcctgccccccggcgtgttcagccacctgaccgccctgagaggcctgagcctgaacagcaacagactgaccgtgctgagccacaacgacctgcccgccaacctggagatcctggacatcagcagaaaccagctgctggcccccaaccccgacgtgttcgtgagcctgagcgtgctggacatcacccacaacaagttcatctgcgagtgcgagctgagcaccttcatcaactggctgaaccacaccaacgtgaccatcgccggcccccccgccgacatctactgcgtgtaccccgacagcttcagcggcgtgagcctgttcagcctgagcaccgagggctgcgacgaggaggaggtgctgaagagcctgaagttcagcctgttcttcgtgtgcaccgtgaccctgaccctgttcctgatgaccatcctgaccgtgaccaagttcagaggcttctgcttcatctgctacaagaccgcccagagactggtgttcaaggaccacccccagggcaccgagcccgacatgtacaagtacgacgcctacctgtgcttcagcagcaaggacttcacctgggtgcagaacgccctgctgaagcacctggacacccagtacagcgaccagaacagattcaacctgtgcttcgaggagagagacttcgtgcccggcgagaacagaatcgccaacatccaggacgccatctggaacagcagaaagatcgtgtgcctggtgagcagacacttcctgagagacggctggtgcctggaggccttcagctacgcccagggcagatgcctgagcgacctgaacagcgccctgatcatggtggtggtgggcagcctgagccagtaccagctgatgaagcaccagagcatcagaggcttcgtgcagaagcagcagtacctgagatggcccgaggacctgcaggacgtgggctggttcctgcacaagctgagccagcagatcctgaagaaggagaaggagaagaagaaggacaacaacatccccctgcagaccgtggccaccatcagctga

SEQ ID NO: 9647 - RNA, 2577 nt, synthetic construct
  misc_feature 1..2577: note = derived and/or modified sequence opt5 fromTLR5__Homo_sapiens__AAZ17470
  source 1..2577: mol_type = other RNA
atgggcgaccacctggatctcctgcttggggtggtcctgatggccggacccgttttcggcatccctagctgctcctttgacgggagaattgctttctaccggttttgtaacctcacccaggtgccgcaagtgctgaatacaacggagcgccttctgctctctttcaactatatcagaaccgtcacagccagctcctttcccttcctggaacagctgcagctcctggagcttggatctcagtacacccctctgacaattgataaggaagcgtttcggaatctccccaacctgcgcatccttgacctgggcagctccaaaatttatttcctccatcctgatgcttttcaagggctgttccacctgtttgagctcagactgtacttctgcggactttctgacgccgtgctgaaggatggctattttcggaccctcaaagccctgacacgccttgacctgagcaagaatcagatcagatccctctacctgcatcccagcttcggcaaactgaactctctcaagtccatcgatttcagctctaatcagatttttctggtttgtgaacacgagcttgagcctctgcaggggaagaccctctccttctttagcctggctgccaactctctttattcccgggtgagcgtcgactggggaaaatgcatgaatccgttccgcaacatggtgctggaaatcctcgatgtttccggcaatgggtggacggtggacattaccggaaacttttctaatgctatcagcaagtcccaagccttcagcctgattctggcgcatcacatcatgggcgccgggtttggattccacaacattaaagatcccgaccagaatacatttgctggcctcgccagatcttccgtccggcatctggaccttagccacggcttcgtgttttctctgaacagccgcgtgttcgagaccctcaaggatctgaaagtcctgaaccttgcttacaataagatcaacaagatcgccgacgaagcgttttacgggctcgataatctgcaggttctgaacctctcctataatctgcttggagagctgtactctagcaacttctatggcctccctaaagtggcctacattgacctgcagaagaatcatatcgctattatccaagatcagacattcaaatttctggagaagctgcagaccctcgacctgagagataacgccctgacgacaattcacttcatcccctccatccctgacatttttctcagcgggaataaactggtgacccttcccaagatcaacctgacagctaatctcattcacctgtctgaaaaccggctggagaatcttgatatcctctatttcctgctgcgcgtcccgcatctccaaattctgatccttaaccagaatagattttccagctgttctggagaccagaccccttccgaaaaccccagcctggagcaactcttcctgggcgaaaacatgctgcagcttgcctgggagaccgagctctgctgggatgtgtttgaagggctgtcccatctgcaggttctctacctgaatcacaactatcttaattctctgcctcccggagtgttcagccacctcacagccctgcggggcctgtcccttaactctaatagactgacggtcctcagccataacgacctgcccgctaatctcgagatcctggacatttcccgcaaccagcttctggcgcctaatccggatgtgtttgttagcctctctgtgctggacatcacccacaacaaattcatttgtgaatgcgagctgtccacatttatcaattggcttaaccacaccaatgtcacaattgccgggccccctgctgatatctactgtgtgtaccccgacagcttctctggcgtctccctgtttagcctctctaccgaaggatgcgatgaggaggaagtgcttaagagcctcaagttctccctgttctttgtttgtacggtgacacttaccctgttcctcatgaccattctgacagtcaccaaatttcggggcttctgctttatctgctataagacagcccagagactggtgttcaaagaccatcctcaagggacggagcccgatatgtacaagtatgacgcctacctttgttttagctctaaagatttcacctgggttcagaacgctctgctcaagcacctggacacacagtattccgatcagaatcgctttaacctctgcttcgaggaacgggactttgtgccgggagaaaacagaatcgccaatattcaagatgcgatctggaacagccgcaagattgtctgtctggtgtcccggcatttccttagagacggctggtgcctggaggctttctcttacgcccaggggcgctgtctgagcgacctcaattccgccctgatcatggtggttgtcggctctcttagccagtatcagctgatgaaacaccaatccattcggggatttgtgcagaagcagcaatacctcagatggcctgaggatctgcaggacgtgggctggttcctccacaaactgtctcagcagatccttaagaaagaaaaggagaagaaaaaggataacaatatccccctgcaaaccgtcgctacaattagctga

SEQ ID NO: 9648 - protein, 858 aa, synthetic construct [sequence omitted]

SEQ ID NO: 9649 - RNA, 2577 nt, synthetic construct
  misc_feature 1..2577: note = TLR5__Homo_sapiens__AAZ17471
  source 1..2577: mol_type = other RNA
atgggagaccacctggaccttctcctaggagtggtgctcatggccggtcctgtgtttggaattccttcctgctcctttgatggccgaatagccttttatcgtttctgcaacctcacccaggtcccccaggtcctcaacaccactgagaggctcctgctgagcttcaactatatcaggacagtcactgcttcatccttcccctttctggaacagctgcagctgctggagctcgggagccagtatacccccttgactattgacaaggaggccttcagaaacctgcccaaccttagaatcttggacctgggaagtagtaagatatacttcttgcatccagatgcttttcagggactgttccatctgtttgaacttagactgtatttctgtggtctctctgatgctgtattgaaagatggttatttcagaaatttaaaggctttaactcgcttggatctatccaaaaatcagattcgtagcctttaccttcatccttcatttgggaagttgaattccttaaagtccatagatttttcctccaaccaaatattccttgtatgtgaacatgagctcgagcccctacaagggaaaacgctctccttttttagcctcgcagctaatagcttgtatagcagagtctcagtggactggggaaaatgtatgaacccattcagaaacatggtgctggagatactagatgtttctggaaatggctggacagtggacatcacaggaaactttagcaatgccatcagcaaaagccaggccttctctttgattcttgcccaccacatcatgggtgccgggtttggcttccataacatcaaagatcctgaccagaacacatttgctggcctggccagaagttcagtgagacacctggatctttcacatgggtttgtcttctccctgaactcacgagtctttgagacactcaaggatttgaaggttctgaaccttgcctacaacaagataaataagattgcagatgaagcattttacggacttgacaacctccaagttctcaatttgtcatataaccttctgggggaactttacggttcgaatttctatggactacctaaggtagcctacattgatttgcaaaagaatcacattgcaataattcaagaccaaacattcaaattcctggaaaaattacagaccttggatctccgagacaatgctcttacaaccattcattttattccaagcatacccgatatcttcttgagtggcaataaactagtgactttgccaaagatcaaccttacagcgaacctcatccacttatcagaaaacaggctagaaaatctagatattctctactttctcctacgggtacctcatctccagattctcattttaaatcaaaatcgcttctcctcctgtagtggagatcaaaccccttcagagaatcccagcttagaacagcttttccttggagaaaatatgttgcaacttgcctgggaaactgagctctgttgggatgtttttgagggactttctcatcttcaagttctgtatttgaatcataactatcttaattcccttccaccaggagtatttagccatctgactgcattaaggggactaagcctcaactccaacaggctgacagttctttctcacaatgatttacctgctaatttagagatcctggacatatccaggaaccagctcctagctcctaatcctgatgtatttgtatcacttagtgtcttggatataactcataacaagttcatttgtgaatgtgaacttagcacttttatcaattggcttaatcacaccaatgtcactatagctgggcctcctgcagacatatattgtgtgtaccctgactcgttctctggggtttccctcttctctctttccacggaaggttgtgatgaagaggaagtcttaaagtccctaaagttctcccttttctttgtatgcactgtcactctgactctgttcctcatgaccatcctcacagtcacaaagttccggggcttctgttttatctgttataagacagcccagagactggtgttcaaggaccatccccagggcacagaacctgatatgtacaaatatgatgcctatttgtgcttcagcagcaaagacttcacatgggtgcagaatgctttgctcaaacacctggacactcaatacagtgaccaaaacagattcaacctgtgctttgaagaaagagactttgtcccaggagaaaaccgcattgccaatatccaggatgccatctggaacagtagaaagatcgtttgtcttgtgagcagacacttccttagagatggctggtgccttgaagccttcagttatgcccagggcaggtgcttatctgaccttaacagtgctctcatcatggtggtggttgggtccttgtcccagtaccagttgatgaaacatcaatccatcagaggctttgtacagaaacagcagtatttgaggtggcctgaggatctccaggatgttggctggtttcttcataaactctctcaacagatactaaagaaagaaaaagaaaagaagaaagacaataacattccgttgcaaactgtagcaaccatctcctaa

SEQ ID NO: 9650 - RNA, 2577 nt, synthetic construct
  misc_feature 1..2577: note = derived and/or modified sequence opt1 fromTLR5__Homo_sapiens__AAZ17471
  source 1..2577: mol_type = other RNA
atgggcgaccacctggacctcctgctgggggtggtcctcatggccggccccgtgttcgggatcccgagctgctccttcgacggccgcatcgccttctaccggttctgcaacctgacccaggtgccccaggtcctgaacaccacggagcgcctcctgctgagcttcaactacatccggaccgtgaccgcgtccagcttccccttcctcgagcagctgcagctgctcgagctggggtcccagtacacgcccctgaccatcgacaaggaggccttccgcaacctcccgaacctgcggatcctggacctcggcagctccaagatctacttcctgcaccccgacgccttccagggcctgttccacctcttcgagctgcgcctgtacttctgcgggctcagcgacgccgtgctgaaggacggctacttccggaacctgaaggccctcacccgcctggacctgtccaagaaccagatccggagcctctacctgcacccctccttcgggaagctgaacagcctcaagtccatcgacttcagctccaaccagatcttcctggtctgcgagcacgagctggagcccctccagggcaagaccctgagcttcttctccctggcggccaacagcctctactcccgcgtgagcgtggactgggggaagtgcatgaacccgttccggaacatggtcctggagatcctggacgtgagcggcaacggctggaccgtggacatcacggggaacttctccaacgccatcagcaagtcccaggccttcagcctcatcctggcgcaccacatcatgggcgccgggttcggcttccacaacatcaaggaccccgaccagaacaccttcgccggcctggcccgctccagcgtccggcacctcgacctgtcccacgggttcgtgttcagcctgaactcccgcgtgttcgagaccctcaaggacctgaaggtcctgaacctggcctacaacaagatcaacaagatcgcggacgaggccttctacggcctcgacaacctccaggtgctgaacctgagctacaacctgctgggggagctctacggctccaacttctacgggctgcccaaggtggcctacatcgacctgcagaagaaccacatcgccatcatccaggaccagaccttcaagttcctcgagaagctgcagacgctggacctccgggacaacgccctgaccaccatccacttcatccccagcatcccggacatcttcctgtccggcaacaagctcgtcaccctgcccaagatcaacctgacggcgaacctcatccacctgagcgagaaccgcctggagaacctcgacatcctgtacttcctgctccgggtgccccacctccagatcctgatcctgaaccagaaccgcttctccagctgctccggcgaccagacccccagcgagaacccgtccctggagcagctgttcctcggggagaacatgctgcagctggcctgggagaccgagctctgctgggacgtgttcgagggcctgagccacctccaggtcctgtacctgaaccacaactacctgaacagcctcccgcccggggtgttctcccacctgaccgccctgcggggcctcagcctgaactccaaccgcctgacggtgctcagccacaacgacctgcccgccaacctggagatcctcgacatctcccggaaccagctgctggcccccaaccccgacgtcttcgtgagcctctccgtcctggacatcacccacaacaagttcatctgcgagtgcgagctgagcaccttcatcaactggctcaaccacaccaacgtgacgatcgcggggccgcccgccgacatctactgcgtgtaccccgactccttcagcggcgtctccctgttcagcctgtccaccgagggctgcgacgaggaggaggtgctcaagagcctgaagttctccctgttcttcgtgtgcaccgtcaccctcacgctgttcctgatgaccatcctcaccgtgaccaagttccgcgggttctgcttcatctgctacaagacggcccagcgcctggtgttcaaggaccacccccagggcaccgagcccgacatgtacaagtacgacgcctacctgtgcttcagctccaaggacttcacctgggtccagaacgccctcctgaagcacctggacacccagtacagcgaccagaaccggttcaacctctgcttcgaggagcgcgacttcgtgcccggggagaaccggatcgcgaacatccaggacgccatctggaacagccgcaagatcgtgtgcctggtctcccggcacttcctgcgcgacggctggtgcctcgaggccttcagctacgcccaggggcggtgcctgtccgacctgaacagcgcgctcatcatggtggtggtcggctccctgagccagtaccagctgatgaagcaccagtccatccgcggcttcgtgcagaagcagcagtacctccggtggccggaggacctgcaggacgtggggtggttcctgcacaagctcagccagcagatcctgaagaaggagaaggagaagaagaaggacaacaacatccccctgcagacggtcgccaccatctcctga

SEQ ID NO: 9651 - RNA, 2577 nt, synthetic construct
  misc_feature 1..2577: note = derived and/or modified sequence opt2 fromTLR5__Homo_sapiens__AAZ17471
  source 1..2577: mol_type = other RNA
atgggcgaccacctcgacctcctcctcggcgtcgtcctcatggccggccccgtcttcggcatcccctcctgctccttcgacggccgcatcgccttctaccgcttctgcaacctcacccaggtcccccaggtcctcaacaccaccgagcgcctcctcctctccttcaactacatccgcaccgtcaccgcctcctccttccccttcctcgagcagctccagctcctcgagctcggctcccagtacacccccctcaccatcgacaaggaggccttccgcaacctccccaacctccgcatcctcgacctcggctcctccaagatctacttcctccaccccgacgccttccagggcctcttccacctcttcgagctccgcctctacttctgcggcctctccgacgccgtcctcaaggacggctacttccgcaacctcaaggccctcacccgcctcgacctctccaagaaccagatccgctccctctacctccacccctccttcggcaagctcaactccctcaagtccatcgacttctcctccaaccagatcttcctcgtctgcgagcacgagctcgagcccctccagggcaagaccctctccttcttctccctcgccgccaactccctctactcccgcgtctccgtcgactggggcaagtgcatgaaccccttccgcaacatggtcctcgagatcctcgacgtctccggcaacggctggaccgtcgacatcaccggcaacttctccaacgccatctccaagtcccaggccttctccctcatcctcgcccaccacatcatgggcgccggcttcggcttccacaacatcaaggaccccgaccagaacaccttcgccggcctcgcccgctcctccgtccgccacctcgacctctcccacggcttcgtcttctccctcaactcccgcgtcttcgagaccctcaaggacctcaaggtcctcaacctcgcctacaacaagatcaacaagatcgccgacgaggccttctacggcctcgacaacctccaggtcctcaacctctcctacaacctcctcggcgagctctacggctccaacttctacggcctccccaaggtcgcctacatcgacctccagaagaaccacatcgccatcatccaggaccagaccttcaagttcctcgagaagctccagaccctcgacctccgcgacaacgccctcaccaccatccacttcatcccctccatccccgacatcttcctctccggcaacaagctcgtcaccctccccaagatcaacctcaccgccaacctcatccacctctccgagaaccgcctcgagaacctcgacatcctctacttcctcctccgcgtcccccacctccagatcctcatcctcaaccagaaccgcttctcctcctgctccggcgaccagaccccctccgagaacccctccctcgagcagctcttcctcggcgagaacatgctccagctcgcctgggagaccgagctctgctgggacgtcttcgagggcctctcccacctccaggtcctctacctcaaccacaactacctcaactccctcccccccggcgtcttctcccacctcaccgccctccgcggcctctccctcaactccaaccgcctcaccgtcctctcccacaacgacctccccgccaacctcgagatcctcgacatctcccgcaaccagctcctcgcccccaaccccgacgtcttcgtctccctctccgtcctcgacatcacccacaacaagttcatctgcgagtgcgagctctccaccttcatcaactggctcaaccacaccaacgtcaccatcgccggcccccccgccgacatctactgcgtctaccccgactccttctccggcgtctccctcttctccctctccaccgagggctgcgacgaggaggaggtcctcaagtccctcaagttctccctcttcttcgtctgcaccgtcaccctcaccctcttcctcatgaccatcctcaccgtcaccaagttccgcggcttctgcttcatctgctacaagaccgcccagcgcctcgtcttcaaggaccacccccagggcaccgagcccgacatgtacaagtacgacgcctacctctgcttctcctccaaggacttcacctgggtccagaacgccctcctcaagcacctcgacacccagtactccgaccagaaccgcttcaacctctgcttcgaggagcgcgacttcgtccccggcgagaaccgcatcgccaacatccaggacgccatctggaactcccgcaagatcgtctgcctcgtctcccgccacttcctccgcgacggctggtgcctcgaggccttctcctacgcccagggccgctgcctctccgacctcaactccgccctcatcatggtcgtcgtcggctccctctcccagtaccagctcatgaagcaccagtccatccgcggcttcgtccagaagcagcagtacctccgctggcccgaggacctccaggacgtcggctggttcctccacaagctctcccagcagatcctcaagaaggagaaggagaagaagaaggacaacaacatccccctccagaccgtcgccaccatctcctga

SEQ ID NO: 9652 - RNA, 2577 nt, synthetic construct
  misc_feature 1..2577: note = derived and/or modified sequence opt3 fromTLR5__Homo_sapiens__AAZ17471
  source 1..2577: mol_type = other RNA
atgggcgaccacctggatctccttctgggggtggtcttgatggccggacccgttttcggtatccctagctgctcctttgacggcagaattgctttctacaggttttgtaacttaacccaggtgccacaagtactgaatacaactgagcggctactcctgtctttcaactatatacgcacggtgaccgcatcaagttttccgttccttgaacagctgcagttgctcgagctggggagccagtacacacccctgactatcgataaggaagcctttcgaaatctccctaacttacgtattctggaccttggatcctctaaaatctatttcttgcatccagatgcgtttcaaggcctgttccacctatttgagctcagactgtacttctgcggtctttcggacgctgtcctgaaggatgggtattttaggaatttgaaagccctcacccggctggacttatcaaagaaccagattcgcagcctgtacctccatcccagtttcggaaaacttaattccctgaagtctatcgatttcagctccaaccagatatttttggtgtgtgaacacgagctagagcctctgcagggcaagacactctcattctttagtctggcagccaatagcctttattctagagtttccgtggactggggcaaatgcatgaacccattcaggaatatggtcctggaaatcttggatgtgtcagggaacggatggaccgtagacattactggtaattttagcaacgctatcagtaagtctcaagcattctccctcattctggcccatcacatcatgggcgctgggtttggattccacaatataaaagatcccgaccagaacacatttgccggcttagcgcggagctcggttcgccatctggacctatctcacggtttcgtgttttccctcaactcacgagtcttcgagaccctgaaggatcttaaagtgttgaatctggcatacaacaagattaataagatcgccgacgaggctttttacgggctcgataacctgcaagtgcttaatctgagttataacttgctcggagaactgtacggcagcaatttctatggcttacctaaagtcgcctacattgacctgcagaagaaccatatcgcaatcattcaggatcagacgttcaaatttctagagaagctccagactctggaccttagagataatgctttgaccacaatacacttcatcccatccattccggacatctttctgtctgggaacaaactcgttactctgcccaagataaatttaaccgccaacctgattcaccttagcgaaaataggttggagaacctcgatatcctgtatttcctactgcgggtgcctcatctccaaatcctgattcttaatcagaaccgtttttcaagttgttccggagaccagacaccaagcgaaaacccctctttggagcagctgttcttaggtgaaaatatgctccaactggcgtgggagaccgagctttgctgggatgtatttgaaggcctgtcacacctccaggtgttgtacctgaaccataattatctaaacagtctgcctccaggggtcttcagccacctcacggccctgcgcggactttccttgaactctaatagactgactgtgttatcgcataatgacctccccgcaaacctggagatccttgacattagcaggaatcagctgctagctccgaaccctgatgtttttgtgtccctctcagtcctggacataacacacaataaattcatctgtgaatgcgagttgagtacctttattaactggctgaatcacactaacgtgacaatcgccggtcccccagctgatatctactgtgtataccctgactctttcagcggcgtttccttattttcactcagcaccgaagggtgcgatgaggaggaagtgctgaagtctcttaagttctccctgttctttgtctgtacggtgaccttgacactcttcctgatgactattctaaccgtcacaaaatttcggggcttctgctttatatgctataagactgcccagcgactggtgttcaaagaccatccccaaggaaccgagccagatatgtacaagtatgacgcatacctttgttttagtagcaaagatttcacatgggttcagaatgccctcctgaagcacttggacacccagtattctgatcagaaccgctttaacctgtgcttcgaagagagagactttgtgcccggcgaaaataggatcgctaacattcaagatgcgatctggaactcccggaagattgtatgtttagtctcacgccatttcctcagagacgggtggtgcctggaggcattcagttacgcccagggaaggtgtcttagcgacctgaactcggctttgatcatggtggttgtgggttccctctctcagtatcagctgatgaaacaccaaagcatacgtggctttgtccagaagcagcaatacctacggtggcctgaggatctgcaggacgtggggtggttccttcacaaactctcacagcagatcctgaagaaagaaaaggagaagaaaaaggataataatattccattgcaaactgtagccacgatcagttga

SEQ ID NO: 9653 - RNA, 2577 nt, synthetic construct
  misc_feature 1..2577: note = derived and/or modified sequence opt4 fromTLR5__Homo_sapiens__AAZ17471
  source 1..2577: mol_type = other RNA
atgggcgaccacctggacctgctgctgggcgtggtgctgatggccggccccgtgttcggcatccccagctgcagcttcgacggcagaatcgccttctacagattctgcaacctgacccaggtgccccaggtgctgaacaccaccgagagactgctgctgagcttcaactacatcagaaccgtgaccgccagcagcttccccttcctggagcagctgcagctgctggagctgggcagccagtacacccccctgaccatcgacaaggaggccttcagaaacctgcccaacctgagaatcctggacctgggcagcagcaagatctacttcctgcaccccgacgccttccagggcctgttccacctgttcgagctgagactgtacttctgcggcctgagcgacgccgtgctgaaggacggctacttcagaaacctgaaggccctgaccagactggacctgagcaagaaccagatcagaagcctgtacctgcaccccagcttcggcaagctgaacagcctgaagagcatcgacttcagcagcaaccagatcttcctggtgtgcgagcacgagctggagcccctgcagggcaagaccctgagcttcttcagcctggccgccaacagcctgtacagcagagtgagcgtggactggggcaagtgcatgaaccccttcagaaacatggtgctggagatcctggacgtgagcggcaacggctggaccgtggacatcaccggcaacttcagcaacgccatcagcaagagccaggccttcagcctgatcctggcccaccacatcatgggcgccggcttcggcttccacaacatcaaggaccccgaccagaacaccttcgccggcctggccagaagcagcgtgagacacctggacctgagccacggcttcgtgttcagcctgaacagcagagtgttcgagaccctgaaggacctgaaggtgctgaacctggcctacaacaagatcaacaagatcgccgacgaggccttctacggcctggacaacctgcaggtgctgaacctgagctacaacctgctgggcgagctgtacggcagcaacttctacggcctgcccaaggtggcctacatcgacctgcagaagaaccacatcgccatcatccaggaccagaccttcaagttcctggagaagctgcagaccctggacctgagagacaacgccctgaccaccatccacttcatccccagcatccccgacatcttcctgagcggcaacaagctggtgaccctgcccaagatcaacctgaccgccaacctgatccacctgagcgagaacagactggagaacctggacatcctgtacttcctgctgagagtgccccacctgcagatcctgatcctgaaccagaacagattcagcagctgcagcggcgaccagacccccagcgagaaccccagcctggagcagctgttcctgggcgagaacatgctgcagctggcctgggagaccgagctgtgctgggacgtgttcgagggcctgagccacctgcaggtgctgtacctgaaccacaactacctgaacagcctgccccccggcgtgttcagccacctgaccgccctgagaggcctgagcctgaacagcaacagactgaccgtgctgagccacaacgacctgcccgccaacctggagatcctggacatcagcagaaaccagctgctggcccccaaccccgacgtgttcgtgagcctgagcgtgctggacatcacccacaacaagttcatctgcgagtgcgagctgagcaccttcatcaactggctgaaccacaccaacgtgaccatcgccggcccccccgccgacatctactgcgtgtaccccgacagcttcagcggcgtgagcctgttcagcctgagcaccgagggctgcgacgaggaggaggtgctgaagagcctgaagttcagcctgttcttcgtgtgcaccgtgaccctgaccctgttcctgatgaccatcctgaccgtgaccaagttcagaggcttctgcttcatctgctacaagaccgcccagagactggtgttcaaggaccacccccagggcaccgagcccgacatgtacaagtacgacgcctacctgtgcttcagcagcaaggacttcacctgggtgcagaacgccctgctgaagcacctggacacccagtacagcgaccagaacagattcaacctgtgcttcgaggagagagacttcgtgcccggcgagaacagaatcgccaacatccaggacgccatctggaacagcagaaagatcgtgtgcctggtgagcagacacttcctgagagacggctggtgcctggaggccttcagctacgcccagggcagatgcctgagcgacctgaacagcgccctgatcatggtggtggtgggcagcctgagccagtaccagctgatgaagcaccagagcatcagaggcttcgtgcagaagcagcagtacctgagatggcccgaggacctgcaggacgtgggctggttcctgcacaagctgagccagcagatcctgaagaaggagaaggagaagaagaaggacaacaacatccccctgcagaccgtggccaccatcagctga

SEQ ID NO: 9654 - RNA, 2577 nt, synthetic construct
  misc_feature 1..2577: note = derived and/or modified sequence opt5 fromTLR5__Homo_sapiens__AAZ17471
  source 1..2577: mol_type = other RNA
atgggcgaccacctggatctcctgcttggggtggtcctgatggccggacccgttttcggcatccctagctgctcctttgacgggagaattgctttctaccggttttgtaacctcacccaggtgccgcaagtgctgaatacaacggagcgccttctgctctctttcaactatatcagaaccgtcacagccagctcctttcccttcctggaacagctgcagctcctggagcttggatctcagtacacccctctgacaattgataaggaagcgtttcggaatctccccaacctgcgcatccttgacctgggcagctccaaaatttatttcctccatcctgatgcttttcaagggctgttccacctgtttgagctcagactgtacttctgcggactttctgacgccgtgctgaaggatggctattttcggaatctcaaagccctgacccgccttgacctgagcaagaaccagatcagatccctctacctgcatcccagcttcggcaaactcaattctctcaagtccatcgatttcagctctaaccagatttttctggtttgtgaacacgagcttgagcctctgcaggggaagacactctccttctttagcctggctgccaattctctttattcccgggtgagcgtcgactggggaaaatgcatgaacccgttccgcaatatggtgctggaaatcctcgatgtttccggcaacgggtggaccgtggacattacgggaaatttttctaacgctatcagcaagtcccaagccttcagcctgattctggcgcatcacatcatgggcgccgggtttggattccacaatattaaagatcccgaccagaacacctttgctggcctcgccagatcttccgtccggcatctggaccttagccacggcttcgtgttttctctgaacagccgcgtgttcgagacactcaaggatctgaaagtcctgaatcttgcttacaacaagatcaataagatcgccgacgaagcgttttacgggctcgataacctgcaggttctgaatctctcctataacctgcttggagagctgtacggctctaatttctatgggctccctaaagtggcctacattgacctgcagaagaaccatatcgctattatccaagatcagaccttcaaatttctggagaagctgcagacactcgacctgagagataatgccctgaccacgattcacttcatccccagcatccctgacatttttctctccggaaacaaactggtgacacttcccaagatcaatctgaccgctaacctcattcacctgagcgaaaatcggctggagaaccttgatatcctctatttcctgctgcgcgtcccgcatctccaaattctgatccttaatcagaacagattttcttcctgtagcggcgaccagacaccttctgaaaacccctccctggagcagctgttcctgggggaaaatatgctgcaacttgcctgggagaccgagctctgctgggatgtgtttgaaggactgagccaccttcaggttctctacctgaaccataattatcttaactccctgcctcccggcgtgttctctcacctcaccgccctgcggggcctgagccttaattccaacagactgacagtcctctctcataatgacctgcccgctaacctcgagatcctggacattagccgcaatcagcttctggcgcctaacccggatgtgtttgtttccctcagcgtgctggacatcacgcacaataaattcatttgtgaatgcgagctgtctacctttatcaactggcttaatcacacaaacgtcaccattgccgggccccctgctgatatctactgtgtgtaccccgactccttcagcggagtctctctgttttccctcagcacagaaggctgcgatgaggaggaagtgctgaagtctctcaagttcagcctgttctttgtttgtaccgtgacgcttacactgttcctcatgaccattctgaccgtcacaaaatttcgggggttctgctttatctgctataagaccgcccagagactggtgttcaaagaccatcctcaaggaacagagcccgatatgtacaagtatgacgcctacctttgtttttccagcaaagatttcacgtgggttcagaatgctctgctcaagcacctggacacccagtattctgatcagaaccgctttaacctctgcttcgaggaacgggactttgtgccgggcgaaaatagaatcgccaacattcaagatgcgatctggaactcccgcaagattgtctgtctggtgagccggcatttccttagagacgggtggtgcctggaggctttctcctacgcccagggccgctgtctgtctgacctcaatagcgccctgatcatggtggttgtcggatccctttctcagtatcagctgatgaaacaccaaagcattcggggctttgtgcagaagcagcaatacctcagatggcctgaggatctgcaggacgtggggtggttcctccacaaactgtcccagcagatccttaagaaagaaaaggagaagaaaaaggataataacatccccctgcaaacagtcgctaccatttcttga

SEQ ID NO: 9655 - protein, 858 aa, synthetic construct [sequence omitted]

SEQ ID NO: 9656 - RNA, 2577 nt, synthetic construct
  misc_feature 1..2577: note = TLR5__Homo_sapiens__AAZ17472
  source 1..2577: mol_type = other RNA
atgggagaccacctggaccttctcctaggagtggtgctcatggccggtcctgtgtttggaattccttcctgctcctttgatggccgaatagccttttatcgtttctgcaacctcacccaggtcccccaggtcctcaacaccactgagaggctcctgctgagcttcaactatatcaggacagtcactgcttcatccttcccctttctggaacagctgcagctgctggagctcgggagccagtatacccccttgactattgacaaggaggccttcagaaacctgcccaaccttagaatcttggacctgggaagtagtaagatatacttcttgcatccagatgcttttcagggactgttccatctgtttgaacttagactgtatttctgtggtctctctgatgctgtattgaaagatggttatttcagaaatttaaaggctttaactcgcttggatctatccaaaaatcagattcgtagcctttaccttcatccttcatttgggaagttgaattccttaaagtccatagatttttcctccaaccaaatattccttgtatgtgaacatgagctcgagcccctacaagggaaaacgctctccttttttagcctcgcagctaatagcttgtatagcagagtctcagtggactggggaaaatgtatgaacccattcagaaacatggtgctggagatactagatgtttctggaaatggctggacagtggacatcacaggaaactttaccaatgccatcagcaaaagccaggccttctctttgattcttgcccaccacatcatgggtgccgggtttggcttccataacatcaaagatcctgaccagaacacatttgctggcctggccagaagttcagtgagacacctggatctttcacatgggtttgtcttctccctgaactcacgagtctttgagacactcaaggatttgaaggttctgaaccttgcctacaacaagataaataagattgcagatgaagcattttacggacttgacaacctccaagttctcaatttgtcatataaccttctgggggaactttacagttcgaatttctatggactacctaaggtagcctacattgatttgcaaaagaatcacattgcaataattcaagaccaaacattcaaattcctggaaaaattacagaccttggatctccgagacaatgctcttacaaccattcattttattccaagcatacccgatatcttcttgagtggcaataaactagtgactttgccaaagatcaaccttacagcgaacctcatccacttatcagaaaacaggctagaaaatctagatattctctactttctcctacgggtacctcatctccagattctcattttaaatcaaaatcgcttctcctcctgtagtggagatcaaaccccttcagagaatcccagcttagaacagcttttccttggagaaaatatgttgcaacttgcctgggaaactgagctctgttgggatgtttttgagggactttctcatcttcaagttctgtatttgaatcataactatcttaattcccttccaccaggagtatttagccatctgactgcattaaggggactaagcctcaactccaacaggctgacagttctttctcacaatgatttacctgctaatttagagatcctggacatatccaggaaccagctcctagctcctaatcctgatgtatttgtatcacttagtgtcttggatataactcataacaagttcatttgtgaatgtgaacttagcacttttatcaattggcttaatcacaccaatgtcactatagctgggcctcctgcagacatatattgtgtgtaccctgactcgttctctggggtttccctcttctctctttccacggaaggttgtgatgaagaggaagtcttaaagtccctaaagttctcccttttctttgtatgcactgtcactctgactctgttcctcatgaccatcctcacagtcacaaagttccggggcttctgttttatctgttataagacagcccagagactggtgttcaaggaccatccccagggcacagaacctgatatgtacaaatatgatgcctatttgtgcttcagcagcaaagacttcacatgggtgcagaatgctttgctcaaacacctggacactcaatacagtgaccaaaacagattcaacctgtgctttgaagaaagagactttgtcccaggagaaaaccgcattgccaatatccaggatgccatctggaacagtagaaagatcgtttgtcttgtgagcagacacttccttagagatggctggtgccttgaagccttcagttatgcccagggcaggtgcttatctgaccttaacagtgctctcatcatggtggtggttgggtccttgtcccagtaccagttgatgaaacatcaatccatcagaggctttgtacagaaacagcagtatttgaggtggcctgaggatctccaggatgttggctggtttcttcataaactctctcaacagatactaaagaaagaaaaagaaaagaagaaagacaataacattccgttgcaaactgtagcaaccatctcctaa

SEQ ID NO: 9657 - RNA, 2577 nt, synthetic construct
  misc_feature 1..2577: note = derived and/or modified sequence opt1 fromTLR5__Homo_sapiens__AAZ17472
  source 1..2577: mol_type = other RNA
atgggcgaccacctggacctcctgctgggggtggtcctcatggccggccccgtgttcgggatcccgagctgctccttcgacggccgcatcgccttctaccggttctgcaacctgacccaggtgccccaggtcctgaacaccacggagcgcctcctgctgagcttcaactacatccggaccgtgaccgcgtccagcttccccttcctcgagcagctgcagctgctcgagctggggtcccagtacacgcccctgaccatcgacaaggaggccttccgcaacctcccgaacctgcggatcctggacctcggcagctccaagatctacttcctgcaccccgacgccttccagggcctgttccacctcttcgagctgcgcctgtacttctgcgggctcagcgacgccgtgctgaaggacggctacttccggaacctgaaggccctcacccgcctggacctgtccaagaaccagatccggagcctctacctgcacccctccttcgggaagctgaacagcctcaagtccatcgacttcagctccaaccagatcttcctggtctgcgagcacgagctggagcccctccagggcaagaccctgagcttcttctccctggcggccaacagcctctactcccgcgtgagcgtggactgggggaagtgcatgaacccgttccggaacatggtcctggagatcctggacgtgagcggcaacggctggaccgtggacatcacggggaacttcaccaacgccatctccaagagccaggccttctccctcatcctggcgcaccacatcatgggcgccgggttcggcttccacaacatcaaggaccccgaccagaacaccttcgccggcctggcccgcagctccgtccggcacctcgacctgagccacgggttcgtgttctccctgaacagccgcgtgttcgagaccctcaaggacctgaaggtcctgaacctggcctacaacaagatcaacaagatcgcggacgaggccttctacggcctcgacaacctccaggtgctgaacctgtcctacaacctgctgggggagctctacagctccaacttctacggcctgcccaaggtggcctacatcgacctgcagaagaaccacatcgccatcatccaggaccagacgttcaagttcctcgagaagctgcagaccctggacctccgggacaacgccctgaccaccatccacttcatccccagcatcccggacatcttcctgtccgggaacaagctcgtcacgctgcccaagatcaacctgaccgcgaacctcatccacctgagcgagaaccgcctggagaacctcgacatcctgtacttcctgctccgggtgccccacctccagatcctgatcctgaaccagaaccgcttctccagctgctccggcgaccagacccccagcgagaacccgtccctggagcagctgttcctcggcgagaacatgctgcagctggcctgggagaccgagctctgctgggacgtgttcgaggggctgagccacctccaggtcctgtacctgaaccacaactacctgaacagcctcccgcccggcgtgttctcccacctgacggccctgcgggggctcagcctgaactccaaccgcctgaccgtgctcagccacaacgacctgcccgccaacctggagatcctcgacatctcccggaaccagctgctggcccccaaccccgacgtcttcgtgagcctctccgtcctggacatcacccacaacaagttcatctgcgagtgcgagctgagcaccttcatcaactggctcaaccacacgaacgtgaccatcgcgggcccgcccgccgacatctactgcgtgtaccccgactccttcagcggggtctccctgttcagcctgtccaccgagggctgcgacgaggaggaggtgctcaagagcctgaagttctccctgttcttcgtgtgcaccgtcacgctcaccctgttcctgatgaccatcctcaccgtgacgaagttccgcggcttctgcttcatctgctacaagaccgcccagcgcctggtgttcaaggaccacccccaggggaccgagcccgacatgtacaagtacgacgcctacctgtgcttcagctccaaggacttcacctgggtccagaacgccctcctgaagcacctggacacgcagtacagcgaccagaaccggttcaacctctgcttcgaggagcgcgacttcgtgcccggcgagaaccggatcgcgaacatccaggacgccatctggaacagccgcaagatcgtgtgcctggtctcccggcacttcctgcgcgacgggtggtgcctcgaggccttcagctacgcccagggccggtgcctgtccgacctgaacagcgcgctcatcatggtggtggtcgggtccctgagccagtaccagctgatgaagcaccagtccatccgcggcttcgtgcagaagcagcagtacctccggtggccggaggacctgcaggacgtgggctggttcctgcacaagctcagccagcagatcctgaagaaggagaaggagaagaagaaggacaacaacatccccctgcagaccgtcgccaccatctcctga

SEQ ID NO: 9658 - RNA, 2577 nt, synthetic construct
  misc_feature 1..2577: note = derived and/or modified sequence opt2 fromTLR5__Homo_sapiens__AAZ17472
  source 1..2577: mol_type = other RNA
atgggcgaccacctcgacctcctcctcggcgtcgtcctcatggccggccccgtcttcggcatcccctcctgctccttcgacggccgcatcgccttctaccgcttctgcaacctcacccaggtcccccaggtcctcaacaccaccgagcgcctcctcctctccttcaactacatccgcaccgtcaccgcctcctccttccccttcctcgagcagctccagctcctcgagctcggctcccagtacacccccctcaccatcgacaaggaggccttccgcaacctccccaacctccgcatcctcgacctcggctcctccaagatctacttcctccaccccgacgccttccagggcctcttccacctcttcgagctccgcctctacttctgcggcctctccgacgccgtcctcaaggacggctacttccgcaacctcaaggccctcacccgcctcgacctctccaagaaccagatccgctccctctacctccacccctccttcggcaagctcaactccctcaagtccatcgacttctcctccaaccagatcttcctcgtctgcgagcacgagctcgagcccctccagggcaagaccctctccttcttctccctcgccgccaactccctctactcccgcgtctccgtcgactggggcaagtgcatgaaccccttccgcaacatggtcctcgagatcctcgacgtctccggcaacggctggaccgtcgacatcaccggcaacttcaccaacgccatctccaagtcccaggccttctccctcatcctcgcccaccacatcatgggcgccggcttcggcttccacaacatcaaggaccccgaccagaacaccttcgccggcctcgcccgctcctccgtccgccacctcgacctctcccacggcttcgtcttctccctcaactcccgcgtcttcgagaccctcaaggacctcaaggtcctcaacctcgcctacaacaagatcaacaagatcgccgacgaggccttctacggcctcgacaacctccaggtcctcaacctctcctacaacctcctcggcgagctctactcctccaacttctacggcctccccaaggtcgcctacatcgacctccagaagaaccacatcgccatcatccaggaccagaccttcaagttcctcgagaagctccagaccctcgacctccgcgacaacgccctcaccaccatccacttcatcccctccatccccgacatcttcctctccggcaacaagctcgtcaccctccccaagatcaacctcaccgccaacctcatccacctctccgagaaccgcctcgagaacctcgacatcctctacttcctcctccgcgtcccccacctccagatcctcatcctcaaccagaaccgcttctcctcctgctccggcgaccagaccccctccgagaacccctccctcgagcagctcttcctcggcgagaacatgctccagctcgcctgggagaccgagctctgctgggacgtcttcgagggcctctcccacctccaggtcctctacctcaaccacaactacctcaactccctcccccccggcgtcttctcccacctcaccgccctccgcggcctctccctcaactccaaccgcctcaccgtcctctcccacaacgacctccccgccaacctcgagatcctcgacatctcccgcaaccagctcctcgcccccaaccccgacgtcttcgtctccctctccgtcctcgacatcacccacaacaagttcatctgcgagtgcgagctctccaccttcatcaactggctcaaccacaccaacgtcaccatcgccggcccccccgccgacatctactgcgtctaccccgactccttctccggcgtctccctcttctccctctccaccgagggctgcgacgaggaggaggtcctcaagtccctcaagttctccctcttcttcgtctgcaccgtcaccctcaccctcttcctcatgaccatcctcaccgtcaccaagttccgcggcttctgcttcatctgctacaagaccgcccagcgcctcgtcttcaaggaccacccccagggcaccgagcccgacatgtacaagtacgacgcctacctctgcttctcctccaaggacttcacctgggtccagaacgccctcctcaagcacctcgacacccagtactccgaccagaaccgcttcaacctctgcttcgaggagcgcgacttcgtccccggcgagaaccgcatcgccaacatccaggacgccatctggaactcccgcaagatcgtctgcctcgtctcccgccacttcctccgcgacggctggtgcctcgaggccttctcctacgcccagggccgctgcctctccgacctcaactccgccctcatcatggtcgtcgtcggctccctctcccagtaccagctcatgaagcaccagtccatccgcggcttcgtccagaagcagcagtacctccgctggcccgaggacctccaggacgtcggctggttcctccacaagctctcccagcagatcctcaagaaggagaaggagaagaagaaggacaacaacatccccctccagaccgtcgccaccatctcctga

SEQ ID NO: 9659 - RNA, 2577 nt, synthetic construct
  misc_feature 1..2577: note = derived and/or modified sequence opt3 fromTLR5__Homo_sapiens__AAZ17472
  source 1..2577: mol_type = other RNA
atgggcgaccacctggatctccttctgggggtggtcttgatggccggacccgttttcggtatccctagctgctcctttgacggcagaattgctttctacaggttttgtaacttaacccaggtgccacaagtactgaatacaactgagcggctactcctgtctttcaactatatacgcacggtgaccgcatcaagttttccgttccttgaacagctgcagttgctcgagctggggagccagtacacacccctgactatcgataaggaagcctttcgaaatctccctaacttacgtattctggaccttggatcctctaaaatctatttcttgcatccagatgcgtttcaaggcctgttccacctatttgagctcagactgtacttctgcggtctttcggacgctgtcctgaaggatgggtattttaggaatttgaaagccctcacccggctggacttatcaaagaaccagattcgcagcctgtacctccatcccagtttcggaaaacttaattccctgaagtctatcgatttcagctccaaccagatatttttggtgtgtgaacacgagctagagcctctgcagggcaagacactctcattctttagtctggcagccaatagcctttattctagagtttccgtggactggggcaaatgcatgaacccattcaggaatatggtcctggaaatcttggatgtgtcagggaacggatggaccgtagacattactggtaattttacaaacgctatcagcaagagtcaagcattctctctcattctggcccatcacatcatgggcgctgggtttggattccacaatataaaagatcccgaccagaacacctttgccggcttagcgcggtccagcgttcgccatctggacctatcgcacggtttcgtgttttctctcaactcccgagtcttcgagacgctgaaggatcttaaagtgttgaatctggcatacaacaagattaataagatcgccgacgaggctttttacgggctcgataacctgcaagtgcttaatctgtcatataacttgctcggagaactgtacagtagcaatttctatggcttacctaaagtcgcctacattgacctgcagaagaaccatatcgcaatcattcaggatcagactttcaaatttctagagaagctccagaccctggaccttagagataatgctttgacaactatacacttcatcccatccattccggacatctttctgtctggcaacaaactcgttaccctgcccaagataaatttaacagccaacctgattcaccttagcgaaaataggttggagaacctcgatatcctgtatttcctactgcgggtgcctcatctccaaatcctgattcttaatcagaaccgtttttcaagttgttccggggaccagaccccaagcgaaaacccctctttggagcagctgttcttaggagaaaatatgctccaactggcgtgggagacggagctttgctgggatgtatttgaaggtctgtcacacctccaggtgttgtacctgaaccataattatctaaacagtctgcctccaggcgtcttcagccacctcactgccctgcgcgggctttccttgaactctaatagactgacagtgttatcgcataatgacctccccgcaaacctggagatccttgacattagcaggaatcagctgctagctccgaaccctgatgtttttgtgtccctctcagtcctggacataacccacaataaattcatctgtgaatgcgagttgagtacttttattaactggctgaatcacacaaacgtgaccatcgccggacccccagctgatatctactgtgtataccctgactctttcagcggcgtttccttattttcactcagcacggaaggttgcgatgaggaggaagtgctgaagtctcttaagttctccctgttctttgtctgtaccgtgacattgactctcttcctgatgaccattctaacagtcactaaatttcgggggttctgctttatatgctataagaccgcccagcgactggtgttcaaagaccatccccaaggcacagagccagatatgtacaagtatgacgcatacctttgttttagtagcaaagatttcacctgggttcagaatgccctcctgaagcacttggacactcagtattctgatcagaaccgctttaacctgtgcttcgaagagagagactttgtgcccggagaaaataggatcgctaacattcaagatgcgatctggaactcccggaagattgtatgtttagtctcacgccatttcctcagagacggctggtgcctggaggcattcagttacgcccaggggaggtgtcttagcgacctgaactcggctttgatcatggtggttgtgggatccctctctcagtatcagctgatgaaacaccaaagcatacgtggttttgtccagaagcagcaatacctacggtggcctgaggatctgcaggacgtgggctggttccttcacaaactctcacagcagatcctgaagaaagaaaaggagaagaaaaaggataataatattccattgcaaacggtagccacaatcagttga

SEQ ID NO: 9660 - RNA, 2577 nt, synthetic construct
  misc_feature 1..2577: note = derived and/or modified sequence opt4 fromTLR5__Homo_sapiens__AAZ17472
  source 1..2577: mol_type = other RNA
atgggcgaccacctggacctgctgctgggcgtggtgctgatggccggccccgtgttcggcatccccagctgcagcttcgacggcagaatcgccttctacagattctgcaacctgacccaggtgccccaggtgctgaacaccaccgagagactgctgctgagcttcaactacatcagaaccgtgaccgccagcagcttccccttcctggagcagctgcagctgctggagctgggcagccagtacacccccctgaccatcgacaaggaggccttcagaaacctgcccaacctgagaatcctggacctgggcagcagcaagatctacttcctgcaccccgacgccttccagggcctgttccacctgttcgagctgagactgtacttctgcggcctgagcgacgccgtgctgaaggacggctacttcagaaacctgaaggccctgaccagactggacctgagcaagaaccagatcagaagcctgtacctgcaccccagcttcggcaagctgaacagcctgaagagcatcgacttcagcagcaaccagatcttcctggtgtgcgagcacgagctggagcccctgcagggcaagaccctgagcttcttcagcctggccgccaacagcctgtacagcagagtgagcgtggactggggcaagtgcatgaaccccttcagaaacatggtgctggagatcctggacgtgagcggcaacggctggaccgtggacatcaccggcaacttcaccaacgccatcagcaagagccaggccttcagcctgatcctggcccaccacatcatgggcgccggcttcggcttccacaacatcaaggaccccgaccagaacaccttcgccggcctggccagaagcagcgtgagacacctggacctgagccacggcttcgtgttcagcctgaacagcagagtgttcgagaccctgaaggacctgaaggtgctgaacctggcctacaacaagatcaacaagatcgccgacgaggccttctacggcctggacaacctgcaggtgctgaacctgagctacaacctgctgggcgagctgtacagcagcaacttctacggcctgcccaaggtggcctacatcgacctgcagaagaaccacatcgccatcatccaggaccagaccttcaagttcctggagaagctgcagaccctggacctgagagacaacgccctgaccaccatccacttcatccccagcatccccgacatcttcctgagcggcaacaagctggtgaccctgcccaagatcaacctgaccgccaacctgatccacctgagcgagaacagactggagaacctggacatcctgtacttcctgctgagagtgccccacctgcagatcctgatcctgaaccagaacagattcagcagctgcagcggcgaccagacccccagcgagaaccccagcctggagcagctgttcctgggcgagaacatgctgcagctggcctgggagaccgagctgtgctgggacgtgttcgagggcctgagccacctgcaggtgctgtacctgaaccacaactacctgaacagcctgccccccggcgtgttcagccacctgaccgccctgagaggcctgagcctgaacagcaacagactgaccgtgctgagccacaacgacctgcccgccaacctggagatcctggacatcagcagaaaccagctgctggcccccaaccccgacgtgttcgtgagcctgagcgtgctggacatcacccacaacaagttcatctgcgagtgcgagctgagcaccttcatcaactggctgaaccacaccaacgtgaccatcgccggcccccccgccgacatctactgcgtgtaccccgacagcttcagcggcgtgagcctgttcagcctgagcaccgagggctgcgacgaggaggaggtgctgaagagcctgaagttcagcctgttcttcgtgtgcaccgtgaccctgaccctgttcctgatgaccatcctgaccgtgaccaagttcagaggcttctgcttcatctgctacaagaccgcccagagactggtgttcaaggaccacccccagggcaccgagcccgacatgtacaagtacgacgcctacctgtgcttcagcagcaaggacttcacctgggtgcagaacgccctgctgaagcacctggacacccagtacagcgaccagaacagattcaacctgtgcttcgaggagagagacttcgtgcccggcgagaacagaatcgccaacatccaggacgccatctggaacagcagaaagatcgtgtgcctggtgagcagacacttcctgagagacggctggtgcctggaggccttcagctacgcccagggcagatgcctgagcgacctgaacagcgccctgatcatggtggtggtgggcagcctgagccagtaccagctgatgaagcaccagagcatcagaggcttcgtgcagaagcagcagtacctgagatggcccgaggacctgcaggacgtgggctggttcctgcacaagctgagccagcagatcctgaagaaggagaaggagaagaagaaggacaacaacatccccctgcagaccgtggccaccatcagctga

SEQ ID NO: 9661 - RNA, 2577 nt, synthetic construct
  misc_feature 1..2577: note = derived and/or modified sequence opt5 fromTLR5__Homo_sapiens__AAZ17472
  source 1..2577: mol_type = other RNA
atgggcgaccacctggatctcctgcttggggtggtcctgatggccggacccgttttcggcatccctagctgctcctttgacgggagaattgctttctaccggttttgtaacctcacccaggtgccgcaagtgctgaatacaacggagcgccttctgctctctttcaactatatcagaaccgtcacagccagctcctttcccttcctggaacagctgcagctcctggagcttggatctcagtacacccctctgacaattgataaggaagcgtttcggaatctccccaacctgcgcatccttgacctgggcagctccaaaatttatttcctccatcctgatgcttttcaagggctgttccacctgtttgagctcagactgtacttctgcggactttctgacgccgtgctgaaggatggctattttcggaatctcaaagccctgacccgccttgacctgagcaagaaccagatcagatccctctacctgcatcccagcttcggcaaactcaattctctcaagtccatcgatttcagctctaaccagatttttctggtttgtgaacacgagcttgagcctctgcaggggaagacactctccttctttagcctggctgccaattctctttattcccgggtgagcgtcgactggggaaaatgcatgaacccgttccgcaatatggtgctggaaatcctcgatgtttccggcaacgggtggaccgtggacattacgggaaattttaccaacgctatctctaagagccaagccttctccctgattctggcgcatcacatcatgggcgccgggtttggattccacaatattaaagatcccgaccagaacacatttgctggcctcgccagaagctctgtccggcatctggacctttcccacggcttcgtgtttagcctgaactctcgcgtgttcgagaccctcaaggatctgaaagtcctgaatcttgcttacaacaagatcaataagatcgccgacgaagcgttttacgggctcgataacctgcaggttctgaatctcagctataacctgcttggagagctgtactcctctaatttctatggcctccctaaagtggcctacattgacctgcagaagaaccatatcgctattatccaagatcagacattcaaatttctggagaagctgcagaccctcgacctgagagataatgccctgacgacaattcacttcatccccagcatccctgacatttttctctccgggaacaaactggtgacccttcccaagatcaatctgacagctaacctcattcacctgagcgaaaatcggctggagaaccttgatatcctctatttcctgctgcgcgtcccgcatctccaaattctgatccttaatcagaacagattttcttcctgtagcggagaccagaccccttctgaaaacccctccctggagcagctgttcctgggcgaaaatatgctgcaacttgcctgggagaccgagctctgctgggatgtgtttgaagggctgagccaccttcaggttctctacctgaaccataattatcttaactccctgcctcccggagtgttctctcacctcacagccctgcggggcctgagccttaattccaacagactgacggtcctctctcataatgacctgcccgctaacctcgagatcctggacattagccgcaatcagcttctggcgcctaacccggatgtgtttgtttccctcagcgtgctggacatcacccacaataaattcatttgtgaatgcgagctgtctacatttatcaactggcttaatcacaccaacgtcacaattgccgggccccctgctgatatctactgtgtgtaccccgactccttcagcggcgtctctctgttttccctcagcaccgaaggatgcgatgaggaggaagtgctgaagtctctcaagttcagcctgttctttgtttgtacggtgacacttaccctgttcctcatgaccattctgacagtcaccaaatttcggggcttctgctttatctgctataagacagcccagagactggtgttcaaagaccatcctcaagggacggagcccgatatgtacaagtatgacgcctacctttgtttttccagcaaagatttcacctgggttcagaatgctctgctcaagcacctggacacacagtattctgatcagaaccgctttaacctctgcttcgaggaacgggactttgtgccgggagaaaatagaatcgccaacattcaagatgcgatctggaactcccgcaagattgtctgtctggtgagccggcatttccttagagacggctggtgcctggaggctttctcctacgcccaggggcgctgtctgtctgacctcaatagcgccctgatcatggtggttgtcggctccctttctcagtatcagctgatgaaacaccaaagcattcggggatttgtgcagaagcagcaatacctcagatggcctgaggatctgcaggacgtgggctggttcctccacaaactgtcccagcagatccttaagaaagaaaaggagaagaaaaaggataataacatccccctgcaaaccgtcgctacaatttcttga

SEQ ID NO: 9662 - protein, 858 aa, synthetic construct [sequence omitted]

SEQ ID NO: 9663 - RNA, 2577 nt, synthetic construct
  misc_feature 1..2577: note = TLR5__Homo_sapiens__AAZ17473
  source 1..2577: mol_type = other RNA
atgggagaccacctggaccttctcctaggagtggtgctcatggccggtcctgtgtttggaattccttcctgctcctttgatggccgaatagccttttatcgtttctgcaacctcacccaggtcccccaggtcctcaacaccactgagaggctcctgctgagcttcaactatatcaggacagtcactgcttcatccttcccctttctggaacagctgcagctgctggagctcgggagccagtatacccccttgactattgacaaggaggccttcagaaacctgcccaaccttagaatcttggacctgggaagtagtaagatatacttcttgcatccagatgcttttcagggactgttccatctgtttgaacttagactgtatttctgtggtctctctgatgctgtattgaaagatggttatttcagaaatttaaaggctttaactcgcttggatctatccaaaaatcagattcgtagcctttaccttcatccttcatttgggaagttgaattccttaaagtccatagatttttcctccaaccaaatattccttgtatgtgaacatgagctcgagcccctacaagggaaaacgctctccttttttagcctcgcagctaatagcttgtatagcagagtctcagtggactggggaaaatgtatgaacccattcagaaacatggtgctggagatactagatgtttctggaaatggctggacagtggacatcacaggaaactttagcaatgccatcagcaaaagccaggccttctctttgattcttgcccaccacatcatgggtgccgggtttggcttccataacatcaaagatcctgaccagaacacatttgctggcctggccagaagttcagtgagacacctggatctttcacatgggtttgtcttctccctgaactcacgagtctttgagacactcaaggatttgaaggttctgaaccttgcctacaacaagataaataagattgcagatgaagcattttacggacttgacaacctccaagttctcaatttgtcatataaccttctgggggaactttacagttcgaatttctatggactacctaaggtagcctacattgatttgcaaaagaatcacattgcaataattcaagaccaaacattcaaattcctggaaaaattacagaccttggatctccgagacaatgctcttacaaccattcattttattccaagcatacccgatatcttcttgagtggcaataaactagtgactttgccaaagatcaaccttacagcgaacctcatccacttatcagaaaacaggctagaaaatctagatattctctactttctcctacgggtacctcatctccagattctcattttaaatcaaaatcgcttctcctcctgtagtggagatcaaaccccttcagagaatcccagcttagaacagcttttccttggagaaaatatgttgcaacttgcctgggaaactgagctctgttgggatgtttttgagggactttctcatcttcaagttctgtatttgaatcataactatcttaattcccttccaccaggagtatttagccatctgactgcattaaggggactaagcctcaactccaacaggctgacagttctttctcacaatgatttacctgctaatttagagatcctggacatatccaggaaccagctcctagctcctaatcctgatgtatttgtatcacttagtgtcttggatataactcataacaagttcatttgtgaatgtgaacttagcacttttatcagttggcttaatcacaccaatgtcactatagctgggcctcctgcagacatatattgtgtgtaccctgactcgttctctggggtttccctcttctctctttccacggaaggttgtgatgaagaggaagtcttaaagtccctaaagttctcccttttctttgtatgcactgtcactctgactctgttcctcatgaccatcctcacagtcacaaagttccggggcttctgttttatctgttataagacagcccagagactggtgttcaaggaccatccccagggcacagaacctgatatgtacaaatatgatgcctatttgtgcttcagcagcaaagacttcacatgggtgcagaatgctttgctcaaacacctggacactcaatacagtgaccaaaacagattcaacctgtgctttgaagaaagagactttgtcccaggagaaaaccgcattgccaatatccaggatgccatctggaacagtagaaagatcgtttgtcttgtgagcagacacttccttagagatggctggtgccttgaagccttcagttatgcccagggcaggtgcttatctgaccttaacagtgctctcatcatggtggtggttgggtccttgtcccagtaccagttgatgaaacatcaatccatcagaggctttgtacagaaacagcagtatttgaggtggcctgaggatctccaggatgttggctggtttcttcataaactctctcaacagatactaaagaaagaaaaagaaaagaagaaagacaataacattccgttgcaaactgtagcaaccatctcctaa

SEQ ID NO: 9664 - RNA, 2577 nt, synthetic construct
  misc_feature 1..2577: note = derived and/or modified sequence opt1 fromTLR5__Homo_sapiens__AAZ17473
  source 1..2577: mol_type = other RNA
atgggcgaccacctggacctcctgctgggggtggtcctcatggccggccccgtgttcgggatcccgagctgctccttcgacggccgcatcgccttctaccggttctgcaacctgacccaggtgccccaggtcctgaacaccacggagcgcctcctgctgagcttcaactacatccggaccgtgaccgcgtccagcttccccttcctcgagcagctgcagctgctcgagctggggtcccagtacacgcccctgaccatcgacaaggaggccttccgcaacctcccgaacctgcggatcctggacctcggcagctccaagatctacttcctgcaccccgacgccttccagggcctgttccacctcttcgagctgcgcctgtacttctgcgggctcagcgacgccgtgctgaaggacggctacttccggaacctgaaggccctcacccgcctggacctgtccaagaaccagatccggagcctctacctgcacccctccttcgggaagctgaacagcctcaagtccatcgacttcagctccaaccagatcttcctggtctgcgagcacgagctggagcccctccagggcaagaccctgagcttcttctccctggcggccaacagcctctactcccgcgtgagcgtggactgggggaagtgcatgaacccgttccggaacatggtcctggagatcctggacgtgagcggcaacggctggaccgtggacatcacggggaacttctccaacgccatcagcaagtcccaggccttcagcctcatcctggcgcaccacatcatgggcgccgggttcggcttccacaacatcaaggaccccgaccagaacaccttcgccggcctggcccgctccagcgtccggcacctcgacctgtcccacgggttcgtgttcagcctgaactcccgcgtgttcgagaccctcaaggacctgaaggtcctgaacctggcctacaacaagatcaacaagatcgcggacgaggccttctacggcctcgacaacctccaggtgctgaacctgagctacaacctgctgggggagctctactccagcaacttctacggcctgcccaaggtggcctacatcgacctgcagaagaaccacatcgccatcatccaggaccagaccttcaagttcctcgagaagctgcagacgctggacctccgggacaacgccctgaccaccatccacttcatcccctccatcccggacatcttcctgagcgggaacaagctcgtcaccctgcccaagatcaacctgacggcgaacctcatccacctgtccgagaaccgcctggagaacctcgacatcctgtacttcctgctccgggtgccccacctccagatcctgatcctgaaccagaaccgcttcagctcctgcagcggcgaccagaccccctccgagaacccgagcctggagcagctgttcctcggcgagaacatgctgcagctggcctgggagaccgagctctgctgggacgtgttcgaggggctgagccacctccaggtcctgtacctgaaccacaactacctgaactccctcccgcccggcgtgttcagccacctgaccgccctgcgggggctctccctgaacagcaaccgcctgacggtgctctcccacaacgacctgcccgccaacctggagatcctcgacatcagccggaaccagctgctggcccccaaccccgacgtcttcgtgtccctcagcgtcctggacatcacccacaacaagttcatctgcgagtgcgagctgtccaccttcatcagctggctcaaccacaccaacgtgacgatcgcgggcccgcccgccgacatctactgcgtgtaccccgactccttcagcggggtctccctgttcagcctgtccaccgagggctgcgacgaggaggaggtgctcaagagcctgaagttctccctgttcttcgtgtgcaccgtcaccctcacgctgttcctgatgaccatcctcaccgtgaccaagttccgcggcttctgcttcatctgctacaagacggcccagcgcctggtgttcaaggaccacccccaggggaccgagcccgacatgtacaagtacgacgcctacctgtgcttcagcagcaaggacttcacctgggtccagaacgccctcctgaagcacctggacacccagtactccgaccagaaccggttcaacctctgcttcgaggagcgcgacttcgtgcccggcgagaaccggatcgcgaacatccaggacgccatctggaacagccgcaagatcgtgtgcctggtctcccggcacttcctgcgcgacgggtggtgcctcgaggccttcagctacgcccagggccggtgcctgtccgacctgaacagcgcgctcatcatggtggtggtcgggtccctgagccagtaccagctgatgaagcaccagtccatccgcggcttcgtgcagaagcagcagtacctccggtggccggaggacctgcaggacgtgggctggttcctgcacaagctcagccagcagatcctgaagaaggagaaggagaagaagaaggacaacaacatccccctgcagacggtcgccaccatctcctga

SEQ ID NO: 9665 - RNA, 2577 nt, synthetic construct
  misc_feature 1..2577: note = derived and/or modified sequence opt2 fromTLR5__Homo_sapiens__AAZ17473
  source 1..2577: mol_type = other RNA
atgggcgaccacctcgacctcctcctcggcgtcgtcctcatggccggccccgtcttcggcatcccctcctgctccttcgacggccgcatcgccttctaccgcttctgcaacctcacccaggtcccccaggtcctcaacaccaccgagcgcctcctcctctccttcaactacatccgcaccgtcaccgcctcctccttccccttcctcgagcagctccagctcctcgagctcggctcccagtacacccccctcaccatcgacaaggaggccttccgcaacctccccaacctccgcatcctcgacctcggctcctccaagatctacttcctccaccccgacgccttccagggcctcttccacctcttcgagctccgcctctacttctgcggcctctccgacgccgtcctcaaggacggctacttccgcaacctcaaggccctcacccgcctcgacctctccaagaaccagatccgctccctctacctccacccctccttcggcaagctcaactccctcaagtccatcgacttctcctccaaccagatcttcctcgtctgcgagcacgagctcgagcccctccagggcaagaccctctccttcttctccctcgccgccaactccctctactcccgcgtctccgtcgactggggcaagtgcatgaaccccttccgcaacatggtcctcgagatcctcgacgtctccggcaacggctggaccgtcgacatcaccggcaacttctccaacgccatctccaagtcccaggccttctccctcatcctcgcccaccacatcatgggcgccggcttcggcttccacaacatcaaggaccccgaccagaacaccttcgccggcctcgcccgctcctccgtccgccacctcgacctctcccacggcttcgtcttctccctcaactcccgcgtcttcgagaccctcaaggacctcaaggtcctcaacctcgcctacaacaagatcaacaagatcgccgacgaggccttctacggcctcgacaacctccaggtcctcaacctctcctacaacctcctcggcgagctctactcctccaacttctacggcctccccaaggtcgcctacatcgacctccagaagaaccacatcgccatcatccaggaccagaccttcaagttcctcgagaagctccagaccctcgacctccgcgacaacgccctcaccaccatccacttcatcccctccatccccgacatcttcctctccggcaacaagctcgtcaccctccccaagatcaacctcaccgccaacctcatccacctctccgagaaccgcctcgagaacctcgacatcctctacttcctcctccgcgtcccccacctccagatcctcatcctcaaccagaaccgcttctcctcctgctccggcgaccagaccccctccgagaacccctccctcgagcagctcttcctcggcgagaacatgctccagctcgcctgggagaccgagctctgctgggacgtcttcgagggcctctcccacctccaggtcctctacctcaaccacaactacctcaactccctcccccccggcgtcttctcccacctcaccgccctccgcggcctctccctcaactccaaccgcctcaccgtcctctcccacaacgacctccccgccaacctcgagatcctcgacatctcccgcaaccagctcctcgcccccaaccccgacgtcttcgtctccctctccgtcctcgacatcacccacaacaagttcatctgcgagtgcgagctctccaccttcatctcctggctcaaccacaccaacgtcaccatcgccggcccccccgccgacatctactgcgtctaccccgactccttctccggcgtctccctcttctccctctccaccgagggctgcgacgaggaggaggtcctcaagtccctcaagttctccctcttcttcgtctgcaccgtcaccctcaccctcttcctcatgaccatcctcaccgtcaccaagttccgcggcttctgcttcatctgctacaagaccgcccagcgcctcgtcttcaaggaccacccccagggcaccgagcccgacatgtacaagtacgacgcctacctctgcttctcctccaaggacttcacctgggtccagaacgccctcctcaagcacctcgacacccagtactccgaccagaaccgcttcaacctctgcttcgaggagcgcgacttcgtccccggcgagaaccgcatcgccaacatccaggacgccatctggaactcccgcaagatcgtctgcctcgtctcccgccacttcctccgcgacggctggtgcctcgaggccttctcctacgcccagggccgctgcctctccgacctcaactccgccctcatcatggtcgtcgtcggctccctctcccagtaccagctcatgaagcaccagtccatccgcggcttcgtccagaagcagcagtacctccgctggcccgaggacctccaggacgtcggctggttcctccacaagctctcccagcagatcctcaagaaggagaaggagaagaagaaggacaacaacatccccctccagaccgtcgccaccatctcctga

SEQ ID NO: 9666 - RNA, 2577 nt, synthetic construct
  misc_feature 1..2577: note = derived and/or modified sequence opt3 fromTLR5__Homo_sapiens__AAZ17473
  source 1..2577: mol_type = other RNA
atgggcgaccacctggatctccttctgggggtggtcttgatggccggacccgttttcggtatccctagctgctcctttgacggcagaattgctttctacaggttttgtaacttaacccaggtgccacaagtactgaatacaactgagcggctactcctgtctttcaactatatacgcacggtgaccgcatcaagttttccgttccttgaacagctgcagttgctcgagctggggagccagtacacacccctgactatcgataaggaagcctttcgaaatctccctaacttacgtattctggaccttggatcctctaaaatctatttcttgcatccagatgcgtttcaaggcctgttccacctatttgagctcagactgtacttctgcggtctttcggacgctgtcctgaaggatgggtattttaggaatttgaaagccctcacccggctggacttatcaaagaaccagattcgcagcctgtacctccatcccagtttcggaaaacttaattccctgaagtctatcgatttcagctccaaccagatatttttggtgtgtgaacacgagctagagcctctgcagggcaagacactctcattctttagtctggcagccaatagcctttattctagagtttccgtggactggggcaaatgcatgaacccattcaggaatatggtcctggaaatcttggatgtgtcagggaacggatggaccgtagacattactggtaattttagcaacgctatcagtaagtctcaagcattctccctcattctggcccatcacatcatgggcgctgggtttggattccacaatataaaagatcccgaccagaacacatttgccggcttagcgcggagctcggttcgccatctggacctatctcacggtttcgtgttttccctcaactcacgagtcttcgagaccctgaaggatcttaaagtgttgaatctggcatacaacaagattaataagatcgccgacgaggctttttacgggctcgataacctgcaagtgcttaatctgagttataacttgctcggagaactgtacagctccaatttctatggcttacctaaagtcgcctacattgacctgcagaagaaccatatcgcaatcattcaggatcagacgttcaaatttctagagaagctccagactctggaccttagagataatgctttgaccacaatacacttcatcccatctattccggacatctttctgagcggcaacaaactcgttactctgcccaagataaatttaaccgccaacctgattcacctttcagaaaataggttggagaacctcgatatcctgtatttcctactgcgggtgcctcatctccaaatcctgattcttaatcagaaccgttttagttcctgtagcggggaccagacaccatctgaaaacccctcattggagcagctgttcttaggagaaaatatgctccaactggcgtgggagaccgagctttgctgggatgtatttgaaggtctgagtcacctccaggtgttgtacctgaaccataattatctaaacagcctgcctccaggcgtcttctcccacctcacggccctgcgcgggctttctttgaactcgaatagactgactgtgttaagccataatgacctccccgcaaacctggagatccttgacatttccaggaatcagctgctagctccgaaccctgatgtttttgtgtcactcagtgtcctggacataacacacaataaattcatctgtgaatgcgagttgtctacctttattagctggctgaaccacactaatgtgacaatcgccggacccccagctgatatctactgtgtataccctgactccttctcaggcgttagcttattttctctctccaccgaaggttgcgatgaggaggaagtgctgaagagtcttaagttcagcctgttctttgtctgtacggtgaccttgacactcttcctgatgactattctaaccgtcacaaaatttcgggggttctgctttatatgctataagactgcccagcgactggtgttcaaagaccatccccaaggcaccgagccagatatgtacaagtatgacgcatacctttgtttttcttccaaagatttcacatgggttcagaacgccctcctgaagcacttggacacccagtattcagatcagaatcgctttaacctgtgcttcgaagagagagactttgtgcccggagaaaacaggatcgctaatattcaagatgcgatctggaacagtcggaagattgtatgtttagtcagccgccatttcctcagagacggctggtgcctggaggcattctcgtacgcccaggggaggtgtctttccgacctgaactctgctttgatcatggtggttgtgggaagcctctcacagtatcagctgatgaaacaccaaagtatacgtggttttgtccagaagcagcaatacctacggtggcctgaggatctgcaggacgtgggctggttccttcacaaactctcccagcagatcctgaagaaagaaaaggagaagaaaaaggataataatattccattgcaaactgtagccacgatctcttga

SEQ ID NO: 9667 - RNA, 2577 nt, synthetic construct
  misc_feature 1..2577: note = derived and/or modified sequence opt4 fromTLR5__Homo_sapiens__AAZ17473
  source 1..2577: mol_type = other RNA
atgggcgaccacctggacctgctgctgggcgtggtgctgatggccggccccgtgttcggcatccccagctgcagcttcgacggcagaatcgccttctacagattctgcaacctgacccaggtgccccaggtgctgaacaccaccgagagactgctgctgagcttcaactacatcagaaccgtgaccgccagcagcttccccttcctggagcagctgcagctgctggagctgggcagccagtacacccccctgaccatcgacaaggaggccttcagaaacctgcccaacctgagaatcctggacctgggcagcagcaagatctacttcctgcaccccgacgccttccagggcctgttccacctgttcgagctgagactgtacttctgcggcctgagcgacgccgtgctgaaggacggctacttcagaaacctgaaggccctgaccagactggacctgagcaagaaccagatcagaagcctgtacctgcaccccagcttcggcaagctgaacagcctgaagagcatcgacttcagcagcaaccagatcttcctggtgtgcgagcacgagctggagcccctgcagggcaagaccctgagcttcttcagcctggccgccaacagcctgtacagcagagtgagcgtggactggggcaagtgcatgaaccccttcagaaacatggtgctggagatcctggacgtgagcggcaacggctggaccgtggacatcaccggcaacttcagcaacgccatcagcaagagccaggccttcagcctgatcctggcccaccacatcatgggcgccggcttcggcttccacaacatcaaggaccccgaccagaacaccttcgccggcctggccagaagcagcgtgagacacctggacctgagccacggcttcgtgttcagcctgaacagcagagtgttcgagaccctgaaggacctgaaggtgctgaacctggcctacaacaagatcaacaagatcgccgacgaggccttctacggcctggacaacctgcaggtgctgaacctgagctacaacctgctgggcgagctgtacagcagcaacttctacggcctgcccaaggtggcctacatcgacctgcagaagaaccacatcgccatcatccaggaccagaccttcaagttcctggagaagctgcagaccctggacctgagagacaacgccctgaccaccatccacttcatccccagcatccccgacatcttcctgagcggcaacaagctggtgaccctgcccaagatcaacctgaccgccaacctgatccacctgagcgagaacagactggagaacctggacatcctgtacttcctgctgagagtgccccacctgcagatcctgatcctgaaccagaacagattcagcagctgcagcggcgaccagacccccagcgagaaccccagcctggagcagctgttcctgggcgagaacatgctgcagctggcctgggagaccgagctgtgctgggacgtgttcgagggcctgagccacctgcaggtgctgtacctgaaccacaactacctgaacagcctgccccccggcgtgttcagccacctgaccgccctgagaggcctgagcctgaacagcaacagactgaccgtgctgagccacaacgacctgcccgccaacctggagatcctggacatcagcagaaaccagctgctggcccccaaccccgacgtgttcgtgagcctgagcgtgctggacatcacccacaacaagttcatctgcgagtgcgagctgagcaccttcatcagctggctgaaccacaccaacgtgaccatcgccggcccccccgccgacatctactgcgtgtaccccgacagcttcagcggcgtgagcctgttcagcctgagcaccgagggctgcgacgaggaggaggtgctgaagagcctgaagttcagcctgttcttcgtgtgcaccgtgaccctgaccctgttcctgatgaccatcctgaccgtgaccaagttcagaggcttctgcttcatctgctacaagaccgcccagagactggtgttcaaggaccacccccagggcaccgagcccgacatgtacaagtacgacgcctacctgtgcttcagcagcaaggacttcacctgggtgcagaacgccctgctgaagcacctggacacccagtacagcgaccagaacagattcaacctgtgcttcgaggagagagacttcgtgcccggcgagaacagaatcgccaacatccaggacgccatctggaacagcagaaagatcgtgtgcctggtgagcagacacttcctgagagacggctggtgcctggaggccttcagctacgcccagggcagatgcctgagcgacctgaacagcgccctgatcatggtggtggtgggcagcctgagccagtaccagctgatgaagcaccagagcatcagaggcttcgtgcagaagcagcagtacctgagatggcccgaggacctgcaggacgtgggctggttcctgcacaagctgagccagcagatcctgaagaaggagaaggagaagaagaaggacaacaacatccccctgcagaccgtggccaccatcagctga

SEQ ID NO: 9668 - RNA, 2577 nt, synthetic construct
  misc_feature 1..2577: note = derived and/or modified sequence opt5 fromTLR5__Homo_sapiens__AAZ17473
  source 1..2577: mol_type = other RNA
atgggcgaccacctggatctcctgcttggggtggtcctgatggccggacccgttttcggcatccctagctgctcctttgacgggagaattgctttctaccggttttgtaacctcacccaggtgccgcaagtgctgaatacaacggagcgccttctgctctctttcaactatatcagaaccgtcacagccagctcctttcccttcctggaacagctgcagctcctggagcttggatctcagtacacccctctgacaattgataaggaagcgtttcggaatctccccaacctgcgcatccttgacctgggcagctccaaaatttatttcctccatcctgatgcttttcaagggctgttccacctgtttgagctcagactgtacttctgcggactttctgacgccgtgctgaaggatggctattttcggaatctcaaagccctgacccgccttgacctgagcaagaaccagatcagatccctctacctgcatcccagcttcggcaaactcaattctctcaagtccatcgatttcagctctaaccagatttttctggtttgtgaacacgagcttgagcctctgcaggggaagacactctccttctttagcctggctgccaattctctttattcccgggtgagcgtcgactggggaaaatgcatgaacccgttccgcaatatggtgctggaaatcctcgatgtttccggcaacgggtggaccgtggacattacgggaaatttttctaacgctatcagcaagtcccaagccttcagcctgattctggcgcatcacatcatgggcgccgggtttggattccacaatattaaagatcccgaccagaacacctttgctggcctcgccagatcttccgtccggcatctggaccttagccacggcttcgtgttttctctgaacagccgcgtgttcgagacactcaaggatctgaaagtcctgaatcttgcttacaacaagatcaataagatcgccgacgaagcgttttacgggctcgataacctgcaggttctgaatctctcctataacctgcttggagagctgtactctagcaatttctatggcctccctaaagtggcctacattgacctgcagaagaaccatatcgctattatccaagatcagaccttcaaatttctggagaagctgcagacactcgacctgagagataatgccctgaccacgattcacttcatcccctccatccctgacatttttctcagcgggaacaaactggtgacacttcccaagatcaatctgaccgctaacctcattcacctgtctgaaaatcggctggagaaccttgatatcctctatttcctgctgcgcgtcccgcatctccaaattctgatccttaatcagaacagattttccagctgttctggagaccagacaccttccgaaaaccccagcctggagcagctgttcctgggcgaaaatatgctgcaacttgcctgggagaccgagctctgctgggatgtgtttgaagggctgtcccaccttcaggttctctacctgaaccataattatcttaactctctgcctcccggagtgttcagccacctcaccgccctgcggggcctgtcccttaattctaacagactgacagtcctcagccataatgacctgcccgctaacctcgagatcctggacatttcccgcaatcagcttctggcgcctaacccggatgtgtttgttagcctctctgtgctggacatcacgcacaataaattcatttgtgaatgcgagctgtccacctttatcagctggcttaaccacacaaatgtcaccattgccgggccccctgctgatatctactgtgtgtaccccgactctttctccggcgtcagcctgttttctctcagcacagaaggatgcgatgaggaggaagtgctgaagtccctcaagttcagcctgttctttgtttgtaccgtgacgcttacactgttcctcatgaccattctgaccgtcacaaaatttcggggcttctgctttatctgctataagaccgcccagagactggtgttcaaagaccatcctcaagggacagagcccgatatgtacaagtatgacgcctacctttgtttttcttccaaagatttcacgtgggttcagaacgctctgctcaagcacctggacacccagtatagcgatcagaatcgctttaacctctgcttcgaggaacgggactttgtgccgggagaaaacagaatcgccaatattcaagatgcgatctggaactcccgcaagattgtctgtctggtgtctcggcatttccttagagacggctggtgcctggaggctttcagctacgcccaggggcgctgtctgtccgacctcaattctgccctgatcatggtggttgtcggcagcctttcccagtatcagctgatgaaacaccaatctattcggggatttgtgcagaagcagcaatacctcagatggcctgaggatctgcaggacgtgggctggttcctccacaaactgagccagcagatccttaagaaagaaaaggagaagaaaaaggataacaatatccccctgcaaacagtcgctaccatttcctga

SEQ ID NO: 9669 - protein, 796 aa, synthetic construct [sequence omitted]

SEQ ID NO: 9670 - RNA, 2391 nt, synthetic construct
  misc_feature 1..2391: note = TLR6__Homo_sapiens__ABW37065
  source 1..2391: mol_type = other RNA
atgaccaaagacaaagaacctattgttaaaagcttccattttgtttgccttatgatcataatagttggaaccagaatccagttctccgacggaaatgaatttgcagtagacaagtcaaaaagaggtcttattcatgttccaaaagacctaccgctgaaaaccaaagtcttagatatgtctcagaactacatcgctgagcttcaggtctctgacatgagctttctatcagagttgacagttttgagactttcccataacagaatccagctacttgatttaagtgttttcaagttcaaccaggatttagaatatttggatttatctcataatcagttgcaaaagatatcctgccatcctattgtgagtttcaggcatttagatctctcattcaatgatttcaaggccctgcccatctgtaaggaatttggcaacttatcacaactgaatttcttgggattgagtgctatgaagctgcaaaaattagatttgctgccaattgctcacttgcatctaagttatatccttctggatttaagaaattattatataaaagaaaatgagacagaaagtctacaaattctgaatgcaaaaacccttcaccttgtttttcacccaactagtttattcgctatccaagtgaacatatcagttaatactttagggtgcttacaactgactaatattaaattgaatgatgacaactgtcaagttttcattaaatttttatcagaactcaccagaggtccaaccttactgaattttaccctcaaccacatagaaacgacttggaaatgcctggtcagagtctttcaatttctttggcccaaacctgtggaatatctcaatatttacaatttaacaataattgaaagcattcgtgaagaagattttacttattctaaaacgacattgaaagcattgacaatagaacatatcacgaaccaagtttttctgttttcacagacagctttgtacaccgtgttttctgagatgaacattatgatgttaaccatttcagatacaccttttatacacatgctgtgtcctcatgcaccaagcacattcaagtttttgaactttacgcagaacgttttcacagatagtatttttgaaaaatgttccacgttagttaaattggagacacttatcttacaaaagaatggattaaaagaccttttcaaagtaggtctcatgacgaaggatatgccttctttggaaatactggatgttagctggaattctttggaatctggtagacataaggaaaactgcacttgggttgagagtatagtggtgttaaatttgtcttcaaatatgcttactgactctgttttcagatgtttacctcccaggatcaaggtacttgatcttcacagcaataaaataaagagcgttcctaaacaagtcttaaaactggaagctttgcaagaactcaatgttgctttcaattctttaactgaccttcctggatgtggcagctttagcagcctttctgtattgatcattgatcacaattcagtttcccacccatcggctgatttcttccagagctgccagaagatgaggtcaataaaagcaggggacaatccattccaatgtacctgtgagctaagagaatttgtcaaaaatatagaccaagtatcaagtgaagtgttagagggctggcctgattcttataagtgtgactacccagaaagttatagaggaagcccactaaaggactttcacatgtctgaattatcctgcaacataactctgctgatcgtcaccatcggtgccaccatgctggtgttggctgtgactgtgacctccctctgcatctacttggatctgccctggtatctcaggatggtgtgccagtggacccagactcggcgcagggccaggaacatacccttagaagaactccaaagaaacctccagtttcatgcttttatttcatatagtgaacatgattctgcctgggtgaaaagtgaattggtaccttacctagaaaaagaagatatacagatttgtcttcatgagagaaactttgtccctggcaagagcattgtggaaaatatcatcaactgcattgagaagagttacaagtccatctttgttttgtctcccaactttgtccagagtgagtggtgccattacgaactctattttgcccatcacaatctctttcatgaaggatctaataacttaatcctcatcttactggaacccattccacagaacagcattcccaacaagtaccacaagctgaaggctctcatgacgcagcggacttatttgcagtggcccaaggagaaaagcaaacgtgggctcttttgggctaacattagagccgcttttaatatgaaattaacactagtcactgaaaacaatgatgtgaaatcttaa

SEQ ID NO: 9671 - RNA, 2391 nt, synthetic construct
  misc_feature 1..2391: note = derived and/or modified sequence opt1 fromTLR6__Homo_sapiens__ABW37065
  source 1..2391: mol_type = other RNA
atgaccaaggacaaggagcccatcgtcaagagcttccacttcgtgtgcctgatgatcatcatcgtgggcacccgcatccagttctccgacgggaacgagttcgccgtggacaagagcaagcggggcctcatccacgtcccgaaggacctgcccctgaagacgaaggtgctcgacatgtcccagaactacatcgccgagctccaggtgagcgacatgtccttcctgagcgagctgaccgtcctgcgcctgtcccacaaccggatccagctcctggacctgagcgtgttcaagttcaaccaggacctcgagtacctggacctgtcccacaaccagctccagaagatcagctgccaccccatcgtgtccttccgccacctggacctgagcttcaacgacttcaaggcgctccccatctgcaaggagttcgggaacctgtcccagctgaacttcctcggcctgagcgccatgaagctgcagaagctcgacctgctgccgatcgcccacctccacctgtcctacatcctgctcgacctgcggaactactacatcaaggagaacgagaccgagagcctgcagatcctcaacgccaagaccctgcacctggtcttccaccccacgtccctcttcgccatccaggtgaacatcagcgtgaacaccctggggtgcctgcagctcaccaacatcaagctgaacgacgacaactgccaggtcttcatcaagttcctgtccgagctcacccgcggccccacgctgctgaacttcaccctcaaccacatcgagaccacctggaagtgcctggtgcgggtgttccagttcctgtggcccaagccggtcgagtacctcaacatctacaacctgacgatcatcgagagcatccgcgaggaggacttcacctacagcaagaccaccctgaaggcgctgacgatcgagcacatcaccaaccaggtgttcctcttctcccagaccgccctgtacaccgtgttcagcgagatgaacatcatgatgctgacgatctccgacacccccttcatccacatgctctgcccccacgcccccagcaccttcaagttcctgaacttcacccagaacgtcttcacggactccatcttcgagaagtgcagcaccctggtgaagctcgagaccctgatcctgcagaagaacggcctcaaggacctgttcaaggtggggctgatgaccaaggacatgccgtccctcgagatcctggacgtcagctggaactccctggagagcggccggcacaaggagaactgcacgtgggtggagtccatcgtggtcctcaacctgagctccaacatgctgaccgacagcgtgttccgctgcctcccgccccggatcaaggtcctggacctgcactccaacaagatcaagagcgtgcccaagcaggtcctcaagctggaggccctgcaggagctcaacgtggcgttcaactccctgaccgacctgcccgggtgcggcagcttctccagcctcagcgtgctgatcatcgaccacaactccgtgagccacccctccgccgacttcttccagagctgccagaagatgcgctccatcaaggccggggacaaccccttccagtgcacgtgcgagctgcgggagttcgtcaagaacatcgaccaggtgagctccgaggtgctcgagggctggcccgacagctacaagtgcgactacccggagtcctaccgcggcagccccctgaaggacttccacatgtccgagctgagctgcaacatcaccctcctgatcgtcaccatcggggccaccatgctggtgctcgccgtgaccgtcacgtccctgtgcatctacctggacctcccctggtacctgcggatggtgtgccagtggacccagacccgccggcgcgcgcggaacatccccctggaggagctccagcgcaacctgcagttccacgccttcatcagctactccgagcacgacagcgcctgggtgaagtccgagctggtcccgtacctcgagaaggaggacatccagatctgcctgcacgagcggaacttcgtgcccggcaagagcatcgtggagaacatcatcaactgcatcgagaagtcctacaagagcatcttcgtcctgagccccaacttcgtgcagtccgagtggtgccactacgagctctacttcgcccaccacaacctgttccacgaggggagcaacaacctgatcctcatcctgctggagcccatcccgcagaactccatccccaacaagtaccacaagctcaaggccctgatgacccagcgcacctacctgcagtggcccaaggagaagtccaagcgcggcctcttctgggcgaacatccgggccgccttcaacatgaagctgacgctggtgaccgagaacaacgacgtcaagagctga

SEQ ID NO: 9672 - RNA, 2391 nt, synthetic construct
  misc_feature 1..2391: note = derived and/or modified sequence opt2 fromTLR6__Homo_sapiens__ABW37065
  source 1..2391: mol_type = other RNA
atgaccaaggacaaggagcccatcgtcaagtccttccacttcgtctgcctcatgatcatcatcgtcggcacccgcatccagttctccgacggcaacgagttcgccgtcgacaagtccaagcgcggcctcatccacgtccccaaggacctccccctcaagaccaaggtcctcgacatgtcccagaactacatcgccgagctccaggtctccgacatgtccttcctctccgagctcaccgtcctccgcctctcccacaaccgcatccagctcctcgacctctccgtcttcaagttcaaccaggacctcgagtacctcgacctctcccacaaccagctccagaagatctcctgccaccccatcgtctccttccgccacctcgacctctccttcaacgacttcaaggccctccccatctgcaaggagttcggcaacctctcccagctcaacttcctcggcctctccgccatgaagctccagaagctcgacctcctccccatcgcccacctccacctctcctacatcctcctcgacctccgcaactactacatcaaggagaacgagaccgagtccctccagatcctcaacgccaagaccctccacctcgtcttccaccccacctccctcttcgccatccaggtcaacatctccgtcaacaccctcggctgcctccagctcaccaacatcaagctcaacgacgacaactgccaggtcttcatcaagttcctctccgagctcacccgcggccccaccctcctcaacttcaccctcaaccacatcgagaccacctggaagtgcctcgtccgcgtcttccagttcctctggcccaagcccgtcgagtacctcaacatctacaacctcaccatcatcgagtccatccgcgaggaggacttcacctactccaagaccaccctcaaggccctcaccatcgagcacatcaccaaccaggtcttcctcttctcccagaccgccctctacaccgtcttctccgagatgaacatcatgatgctcaccatctccgacacccccttcatccacatgctctgcccccacgccccctccaccttcaagttcctcaacttcacccagaacgtcttcaccgactccatcttcgagaagtgctccaccctcgtcaagctcgagaccctcatcctccagaagaacggcctcaaggacctcttcaaggtcggcctcatgaccaaggacatgccctccctcgagatcctcgacgtctcctggaactccctcgagtccggccgccacaaggagaactgcacctgggtcgagtccatcgtcgtcctcaacctctcctccaacatgctcaccgactccgtcttccgctgcctccccccccgcatcaaggtcctcgacctccactccaacaagatcaagtccgtccccaagcaggtcctcaagctcgaggccctccaggagctcaacgtcgccttcaactccctcaccgacctccccggctgcggctccttctcctccctctccgtcctcatcatcgaccacaactccgtctcccacccctccgccgacttcttccagtcctgccagaagatgcgctccatcaaggccggcgacaaccccttccagtgcacctgcgagctccgcgagttcgtcaagaacatcgaccaggtctcctccgaggtcctcgagggctggcccgactcctacaagtgcgactaccccgagtcctaccgcggctcccccctcaaggacttccacatgtccgagctctcctgcaacatcaccctcctcatcgtcaccatcggcgccaccatgctcgtcctcgccgtcaccgtcacctccctctgcatctacctcgacctcccctggtacctccgcatggtctgccagtggacccagacccgccgccgcgcccgcaacatccccctcgaggagctccagcgcaacctccagttccacgccttcatctcctactccgagcacgactccgcctgggtcaagtccgagctcgtcccctacctcgagaaggaggacatccagatctgcctccacgagcgcaacttcgtccccggcaagtccatcgtcgagaacatcatcaactgcatcgagaagtcctacaagtccatcttcgtcctctcccccaacttcgtccagtccgagtggtgccactacgagctctacttcgcccaccacaacctcttccacgagggctccaacaacctcatcctcatcctcctcgagcccatcccccagaactccatccccaacaagtaccacaagctcaaggccctcatgacccagcgcacctacctccagtggcccaaggagaagtccaagcgcggcctcttctgggccaacatccgcgccgccttcaacatgaagctcaccctcgtcaccgagaacaacgacgtcaagtcctga

SEQ ID NO: 9673 - RNA, 2391 nt, synthetic construct
  misc_feature 1..2391: note = derived and/or modified sequence opt3 fromTLR6__Homo_sapiens__ABW37065
  source 1..2391: mol_type = other RNA
atgaccaaggacaaagagcccatcgtcaagagcttccactttgtgtgcctgatgattataatcgttggcacaaggattcagttctccgatgggaacgaatttgccgtggacaaatctaagagaggactcatccatgtacctaaagatcttccactgaagactaaggtgttggacatgtcacaaaattacattgctgagttacaggtcagtgatatgagcttcctgtccgaactaacggtgctccggctgtctcacaaccgcatccagcttctggacttgtcggtttttaaattcaatcaggatctcgagtatctggacctgtcacataaccaactccagaagataagctgtcacccgatcgtgagttttcgacatttagatctgtccttcaatgactttaaagcacttcccatttgcaaggagttcggtaacttgtctcagctgaattttctaggcctcagcgccatgaaactgcagaaacttgatctgttgcctatcgcgcacctccacctgtcctacattttactggacctccgtaactattacatcaaggaaaatgagaccgaatcacttcaaatactgaacgctaaaacattgcatctagtcttccacccaacttccctgtttgccattcaggtgaatatcagcgtaaacaccctcgggtgtctgcagcttacaaatattaagctgaacgatgacaattgccaggttttcatcaaattcttgtctgagctcaccagaggacccactctgttaaactttacactgaaccatatcgaaaccacgtggaagtgtctagtgagggtcttccaatttctctggcctaaaccagtggagtatctgaatatttacaaccttactataatcgagtccattcgggaagaggacttcacctattcaaagacaactttgaaagcactgaccatcgaacacataacaaatcaggtgtttctcttcagccagaccgccctgtacacggtctttagtgagatgaacattatgatgcttactatctctgatacacccttcatccacatgctgtgccctcatgctccatccacctttaagttcttgaattttactcaaaacgttttcacagacagcatttttgaaaagtgttcgaccctcgtgaaactggagacgttaatcctgcagaagaatggcctaaaagatctcttcaaggtaggtctgatgaccaaagacatgccgtctcttgagattttggatgtgtcctggaactcactggaaagtgggcgccacaaggagaattgcacatgggtcgaaagcatagtggttctcaacctgtcctctaatatgttaactgacagcgtgttcagatgtctgccccctaggatcaaggtccttgatttgcattcaaacaaaattaagagtgtgccaaaacaggtactcaagctggaggcactacaggaactgaatgttgcctttaactccctcaccgacctgcccggatgcggcagcttctcttcacttagtgtgttgatcatcgatcacaatagcgtctcccatccttctgctgactttttccaatcgtgtcagaaaatgcggagcattaaggccggcgataacccatttcagtgcacatgcgagctgcgcgagttcgtgaagaacatagaccaggtctcctcagaagtgttagaggggtggcccgacagttacaaatgtgattatccggaatcttaccgaggaagccctctcaaggactttcacatgtccgagctgtcatgcaatatcactcttctgattgttaccatcggtgcgacaatgttggtgctcgcagtaaccgtcactagcctgtgtatttatctagatctgccctggtacctcagaatggtgtgccaatggacgcagacaaggcggcgtgcccgcaacatcccactggaggaacttcagagaaatttgcagttccacgcttttatatcttattccgagcatgacagtgcctgggttaaaagcgaactggtgccttacttagagaaggaagatatccaaatttgtctccacgagaggaacttcgtccccggcaaatctatcgtggagaatattatcaactgcatagaaaagtcctataagtcaatttttgtactgagtccaaatttcgtgcagagcgagtggtgtcattacgaactttactttgcacaccacaacctgttccatgaggggtcgaataacctaatcctcattctgttggaacccatccctcagaatagtataccaaacaaatatcacaagctgaaggctttaatgacccagcggacttacctccaatggccgaaggagaaatctaagcgaggactgttctgggccaatatccgcgcggcctttaacatgaaacttaccctggttacagagaataacgacgtcaagagctga

SEQ ID NO: 9674 - RNA, 2391 nt, synthetic construct
  misc_feature 1..2391: note = derived and/or modified sequence opt4 fromTLR6__Homo_sapiens__ABW37065
  source 1..2391: mol_type = other RNA
atgaccaaggacaaggagcccatcgtgaagagcttccacttcgtgtgcctgatgatcatcatcgtgggcaccagaatccagttcagcgacggcaacgagttcgccgtggacaagagcaagagaggcctgatccacgtgcccaaggacctgcccctgaagaccaaggtgctggacatgagccagaactacatcgccgagctgcaggtgagcgacatgagcttcctgagcgagctgaccgtgctgagactgagccacaacagaatccagctgctggacctgagcgtgttcaagttcaaccaggacctggagtacctggacctgagccacaaccagctgcagaagatcagctgccaccccatcgtgagcttcagacacctggacctgagcttcaacgacttcaaggccctgcccatctgcaaggagttcggcaacctgagccagctgaacttcctgggcctgagcgccatgaagctgcagaagctggacctgctgcccatcgcccacctgcacctgagctacatcctgctggacctgagaaactactacatcaaggagaacgagaccgagagcctgcagatcctgaacgccaagaccctgcacctggtgttccaccccaccagcctgttcgccatccaggtgaacatcagcgtgaacaccctgggctgcctgcagctgaccaacatcaagctgaacgacgacaactgccaggtgttcatcaagttcctgagcgagctgaccagaggccccaccctgctgaacttcaccctgaaccacatcgagaccacctggaagtgcctggtgagagtgttccagttcctgtggcccaagcccgtggagtacctgaacatctacaacctgaccatcatcgagagcatcagagaggaggacttcacctacagcaagaccaccctgaaggccctgaccatcgagcacatcaccaaccaggtgttcctgttcagccagaccgccctgtacaccgtgttcagcgagatgaacatcatgatgctgaccatcagcgacacccccttcatccacatgctgtgcccccacgcccccagcaccttcaagttcctgaacttcacccagaacgtgttcaccgacagcatcttcgagaagtgcagcaccctggtgaagctggagaccctgatcctgcagaagaacggcctgaaggacctgttcaaggtgggcctgatgaccaaggacatgcccagcctggagatcctggacgtgagctggaacagcctggagagcggcagacacaaggagaactgcacctgggtggagagcatcgtggtgctgaacctgagcagcaacatgctgaccgacagcgtgttcagatgcctgccccccagaatcaaggtgctggacctgcacagcaacaagatcaagagcgtgcccaagcaggtgctgaagctggaggccctgcaggagctgaacgtggccttcaacagcctgaccgacctgcccggctgcggcagcttcagcagcctgagcgtgctgatcatcgaccacaacagcgtgagccaccccagcgccgacttcttccagagctgccagaagatgagaagcatcaaggccggcgacaaccccttccagtgcacctgcgagctgagagagttcgtgaagaacatcgaccaggtgagcagcgaggtgctggagggctggcccgacagctacaagtgcgactaccccgagagctacagaggcagccccctgaaggacttccacatgagcgagctgagctgcaacatcaccctgctgatcgtgaccatcggcgccaccatgctggtgctggccgtgaccgtgaccagcctgtgcatctacctggacctgccctggtacctgagaatggtgtgccagtggacccagaccagaagaagagccagaaacatccccctggaggagctgcagagaaacctgcagttccacgccttcatcagctacagcgagcacgacagcgcctgggtgaagagcgagctggtgccctacctggagaaggaggacatccagatctgcctgcacgagagaaacttcgtgcccggcaagagcatcgtggagaacatcatcaactgcatcgagaagagctacaagagcatcttcgtgctgagccccaacttcgtgcagagcgagtggtgccactacgagctgtacttcgcccaccacaacctgttccacgagggcagcaacaacctgatcctgatcctgctggagcccatcccccagaacagcatccccaacaagtaccacaagctgaaggccctgatgacccagagaacctacctgcagtggcccaaggagaagagcaagagaggcctgttctgggccaacatcagagccgccttcaacatgaagctgaccctggtgaccgagaacaacgacgtgaagagctga

SEQ ID NO: 9675 - RNA, 2391 nt, synthetic construct
  misc_feature 1..2391: note = derived and/or modified sequence opt5 fromTLR6__Homo_sapiens__ABW37065
  source 1..2391: mol_type = other RNA
atgaccaaggacaaagagcccatcgtgaagtccttccactttgtgtgcctgatgattatcattgttggcacaagaatccagttctccgatgggaacgaatttgccgtggacaaatctaagcggggactcattcatgtgcctaaagatctgccgcttaagacgaaggtcctggacatgagccaaaattacatcgctgagctccaggtgtccgatatgtctttcctgagcgaacttaccgttctgcgcctctcccacaacagaatccagctgctggacctctctgtgtttaaattcaatcaggatctggagtatcttgacctgagccataaccaactccagaagatttcctgtcaccccatcgtcagctttcggcatctggatctttctttcaatgactttaaagccctgcctatttgcaaggagttcggcaacctctcccagctgaattttctggggctcagcgcgatgaaactgcagaagctcgatctgctccccatcgctcatctgcacctttcttacattctgctcgacctgcgcaactattacatcaaggagaatgagacagaatccctgcaaattctcaacgccaaaaccctgcaccttgtgttccaccctacaagcctgtttgccatccaggttaatatctctgtgaacaccctcggatgtctgcagcttacaaatattaagctgaacgatgacaattgccaggtcttcatcaaattcctctccgagctgaccagaggccccacgctgctcaactttaccctgaaccatattgaaacaacctggaagtgtcttgtgcgggtgttccaatttctgtggcctaaaccggtcgagtatctcaatatctacaacctgacaattatcgagagcatccgcgaagaggacttcacctattccaagacgacactgaaagctcttaccattgaacacatcacaaatcaggtttttctcttctctcagaccgccctgtacaccgtgtttagcgagatgaacattatgatgctgacaatctccgatacgcccttcattcacatgctctgccctcatgctcccagcacctttaagttcctgaattttacacaaaacgtgttcaccgactctatctttgaaaagtgttccacacttgtcaaactggagaccctcatcctgcagaagaatgggctgaaagatcttttcaaggtgggactcatgacgaaagacatgcctagcctggagattctggatgtttcttggaacagcctcgaatccggcagacacaaggagaattgcacatgggtggaatctatcgtcgtgctgaaccttagctccaatatgctgaccgacagcgttttccggtgtcttcccccgcgcattaaggtgctggatctgcattctaacaaaatcaagtccgtccctaaacaggtgcttaagctcgaggccctgcaggaactgaatgtcgcgtttaacagcctcaccgacctgcccggctgcgggtctttctccagcctttccgtgctgattatcgatcacaattctgttagccatccttccgccgactttttccaatcttgtcagaaaatgagaagcattaaggctggagataacccctttcagtgcacatgcgagctccgggagttcgtgaagaacatcgaccaggtctccagcgaagtgctggagggctggcccgactcttacaaatgtgattatcctgaatcctaccgcgggagcccgctgaaggactttcacatgtctgagctttcctgcaatatcaccctcctgattgttacaatcggagccacgatgctggtgctcgctgtcaccgtgacaagcctgtgtatttatcttgatctgccctggtacctcagaatggtgtgccaatggacccagacacggcgcagagcccggaacatccctctggaagaactgcagagaaatcttcagttccacgcgtttatttcttatagcgagcatgactccgcctgggttaaaagcgaactggtcccctacctcgagaaggaagatatccaaatctgtctgcacgagcgcaacttcgtgcctggcaaatctattgtggagaatatcattaactgcatcgaaaagtcctataagagcatttttgtcctctcccccaatttcgtgcagtctgagtggtgtcattacgaactgtactttgctcaccacaaccttttccatgaggggagcaataacctgatcctcatcctgctggaaccgattcctcagaatagcatccccaacaaatatcacaaacttaaggccctgatgacccagcggacgtacctccaatggcctaaggagaaatctaagagaggactgttctgggctaatattcgcgccgcctttaacatgaaactcaccctggttacagagaataacgacgtcaagagctga

SEQ ID NO: 9676 - protein, 796 aa, synthetic construct [sequence omitted]

SEQ ID NO: 9677 - RNA, 2391 nt, synthetic construct
  misc_feature 1..2391: note = TLR6__Homo_sapiens__ABW37070
  source 1..2391: mol_type = other RNA
atgaccaaagacaaagaacctattgttaaaagcttccattttgtttgccttatgatcataatagttggaaccagaatccagttctccgacggaaatgaatttgcagtagacaagtcaaaaagaggtcttattcatgttccaaaagacctaccgctgaaaaccaaagtcttagatacgtctcagaactacatcgctgagcttcaggtctctgacatgagctttctatcagagttgacagttttgagactttcccataacagaatccagctacttgatttaagtgttttcaagttcaaccaggatttagaatatttggatttatctcataatcagttgcaaaagatatcctgccatcctattgtgagtttcaggcatttagatctctcattcaatgatttcaaggccctgcccatctgtaaggaatttggcaacttatcacaactgaatttcttgggattgagtgctatgaagctgcaaaaattagatttgctgccaattgctcacttgcatctaagttatatccttctggatttaagaaattattatataaaagaaaatgagacagaaagtctacaaattctgaatgcaaaaacccttcaccttgtttttcacccaactagtttattcgctatccaagtgaacatatcagttaatactttagggtgcttacaactgactaatattaaattgaatgatgacaactgtcaagttttcattaaatttttatcagaactcaccagaggtccaaccttactgaattttaccctcaaccacatagaaacgacttggaaatgcctggtcagagtctttcaatttctttggcccaaacctgtggaatatctcaatatttacaatttaacaataattgaaagcattcgtgaagaagattttacttattctaaaacgacattgaaagcattgacaatagaacatatcacgaaccaagtttttctgttttcacagacagctttgtacaccgtgttttctgagatgaacattatgatgttaaccatttcagatacaccttttatacacatgctgtgtcctcatgcaccaagcacattcaagtttttgaactttacccagaacgttttcacagatagtatttttgaaaaatgttccacgttagttaaattggagacacttatcttacaaaagaatggattaaaagaccttttcaaagtaggtctcatgacgaaggatatgccttctttggaaatactggatgttagctggaattctttggaatctggtagacataaagaaaactgcacttgggttgagagtatagtggtgttaaatttgtcttcaaatatgcttactgactctgttttcagatgtttacctcccaggatcaaggtacttgatcttcacagcaataaaataaagagcgttcctaaacaagtcgtaaaactggaagctttgcaagaactcaatgttgctttcaattctttaactgaccttcctggatgtggcagctttagcagcctttctgtattgatcattgatcacaattcagtttcccacccatcggctgatttcttccagagctgccagaagatgaggtcaataaaagcaggggacaatccattccaatgtacctgtgagctaagagaatttgtcaaaaatatagaccaagtatcaagtgaagtgttagagggctggcctgattcttataagtgtgactacccagaaagttatagaggaagcccactaaaggactttcacatgtctgaattatcctgcaacataactctgctgatcgtcaccatcggtgccaccatgctggtgttggctgtgactgtgacctccctctgcatctacttggatctgccctggtatctcaggatggtgtgccagtggacccagactcggcgcagggccaggaacatacccttagaagaactccaaagaaacctccagtttcatgcttttatttcatatagtgaacatgattctgcctgggtgaaaagtgaattggtaccttacctagaaaaagaagatatacagatttgtcttcatgagagaaactttgtccctggcaagagcattgtggaaaatatcatcaactgcattgagaagagttacaagtccatctttgttttgtctcccaactttgtccagagtgagtggtgccattacgaactctattttgcccatcacaatctctttcatgaaggatctaataacttaatcctcatcttactggaacccattccacagaacagcattcccaacaagtaccacaagctgaaggctctcatgacgcagcggacttatttgcagtggcccaaggagaaaagcaaacgtgggctcttttgggctaacattagagccgcttttaatatgaaattaacactagtcactgaaaacaatgatgtgaaatcttaa

SEQ ID NO: 9678 - RNA, 2391 nt, synthetic construct
  misc_feature 1..2391: note = derived and/or modified sequence opt1 fromTLR6__Homo_sapiens__ABW37070
  source 1..2391: mol_type = other RNA
atgaccaaggacaaggagcccatcgtcaagagcttccacttcgtgtgcctgatgatcatcatcgtgggcacccgcatccagttcagcgacgggaacgagttcgccgtggacaagagcaagcggggcctcatccacgtcccgaaggacctgcccctgaagacgaaggtgctcgacacctcccagaactacatcgccgagctccaggtgagcgacatgtccttcctgagcgagctgaccgtcctgcgcctgtcccacaaccggatccagctcctggacctgagcgtgttcaagttcaaccaggacctcgagtacctggacctgtcccacaaccagctccagaagatcagctgccaccccatcgtgtccttccgccacctggacctgagcttcaacgacttcaaggcgctccccatctgcaaggagttcgggaacctgtcccagctgaacttcctcggcctgagcgccatgaagctgcagaagctcgacctgctgccgatcgcccacctccacctgtcctacatcctgctcgacctgcggaactactacatcaaggagaacgagaccgagagcctgcagatcctcaacgccaagacgctgcacctggtcttccaccccacctccctcttcgccatccaggtgaacatcagcgtgaacaccctggggtgcctgcagctcaccaacatcaagctgaacgacgacaactgccaggtcttcatcaagttcctgtccgagctcacgcgcggccccaccctgctgaacttcaccctcaaccacatcgagaccacgtggaagtgcctggtgcgggtgttccagttcctgtggcccaagccggtcgagtacctcaacatctacaacctgaccatcatcgagagcatccgcgaggaggacttcacctacagcaagaccacgctgaaggcgctgaccatcgagcacatcaccaaccaggtgttcctcttctcccagaccgccctgtacacggtgttcagcgagatgaacatcatgatgctgaccatctccgacacccccttcatccacatgctctgcccccacgcccccagcaccttcaagttcctgaacttcacgcagaacgtcttcaccgactccatcttcgagaagtgcagcaccctggtgaagctcgagaccctgatcctgcagaagaacggcctcaaggacctgttcaaggtggggctgatgacgaaggacatgccgtccctcgagatcctggacgtcagctggaactccctggagagcggccggcacaaggagaactgcacctgggtggagtccatcgtggtcctcaacctgagctccaacatgctgaccgacagcgtgttccgctgcctcccgccccggatcaaggtcctggacctgcactccaacaagatcaagagcgtgcccaagcaggtcgtgaagctcgaggccctgcaggagctgaacgtggcgttcaactccctcaccgacctgcccgggtgcggcagcttctccagcctgagcgtgctcatcatcgaccacaactccgtcagccacccctccgccgacttcttccagagctgccagaagatgcgctccatcaaggccggggacaaccccttccagtgcacgtgcgagctgcgggagttcgtgaagaacatcgaccaggtgagctccgaggtcctggagggctggcccgacagctacaagtgcgactacccggagtcctaccgcggcagccccctcaaggacttccacatgtccgagctgagctgcaacatcaccctgctcatcgtgaccatcggggccaccatgctggtgctggccgtcacggtgacctccctctgcatctacctggacctgccctggtacctccggatggtgtgccagtggacccagacccgccggcgcgcgcggaacatccccctggaggagctgcagcgcaacctccagttccacgccttcatcagctactccgagcacgacagcgcctgggtcaagtccgagctggtgccgtacctggagaaggaggacatccagatctgcctccacgagcggaacttcgtgcccggcaagagcatcgtcgagaacatcatcaactgcatcgagaagtcctacaagagcatcttcgtgctgagccccaacttcgtgcagtccgagtggtgccactacgagctgtacttcgcccaccacaacctcttccacgaggggagcaacaacctgatcctgatcctcctggagcccatcccgcagaactccatccccaacaagtaccacaagctgaaggccctcatgacccagcgcacgtacctgcagtggcccaaggagaagtccaagcgcggcctgttctgggcgaacatccgggccgccttcaacatgaagctcaccctggtcaccgagaacaacgacgtgaagtcctga

SEQ ID NO: 9679 - RNA, 2391 nt, synthetic construct
  misc_feature 1..2391: note = derived and/or modified sequence opt2 fromTLR6__Homo_sapiens__ABW37070
  source 1..2391: mol_type = other RNA
atgaccaaggacaaggagcccatcgtcaagtccttccacttcgtctgcctcatgatcatcatcgtcggcacccgcatccagttctccgacggcaacgagttcgccgtcgacaagtccaagcgcggcctcatccacgtccccaaggacctccccctcaagaccaaggtcctcgacacctcccagaactacatcgccgagctccaggtctccgacatgtccttcctctccgagctcaccgtcctccgcctctcccacaaccgcatccagctcctcgacctctccgtcttcaagttcaaccaggacctcgagtacctcgacctctcccacaaccagctccagaagatctcctgccaccccatcgtctccttccgccacctcgacctctccttcaacgacttcaaggccctccccatctgcaaggagttcggcaacctctcccagctcaacttcctcggcctctccgccatgaagctccagaagctcgacctcctccccatcgcccacctccacctctcctacatcctcctcgacctccgcaactactacatcaaggagaacgagaccgagtccctccagatcctcaacgccaagaccctccacctcgtcttccaccccacctccctcttcgccatccaggtcaacatctccgtcaacaccctcggctgcctccagctcaccaacatcaagctcaacgacgacaactgccaggtcttcatcaagttcctctccgagctcacccgcggccccaccctcctcaacttcaccctcaaccacatcgagaccacctggaagtgcctcgtccgcgtcttccagttcctctggcccaagcccgtcgagtacctcaacatctacaacctcaccatcatcgagtccatccgcgaggaggacttcacctactccaagaccaccctcaaggccctcaccatcgagcacatcaccaaccaggtcttcctcttctcccagaccgccctctacaccgtcttctccgagatgaacatcatgatgctcaccatctccgacacccccttcatccacatgctctgcccccacgccccctccaccttcaagttcctcaacttcacccagaacgtcttcaccgactccatcttcgagaagtgctccaccctcgtcaagctcgagaccctcatcctccagaagaacggcctcaaggacctcttcaaggtcggcctcatgaccaaggacatgccctccctcgagatcctcgacgtctcctggaactccctcgagtccggccgccacaaggagaactgcacctgggtcgagtccatcgtcgtcctcaacctctcctccaacatgctcaccgactccgtcttccgctgcctccccccccgcatcaaggtcctcgacctccactccaacaagatcaagtccgtccccaagcaggtcgtcaagctcgaggccctccaggagctcaacgtcgccttcaactccctcaccgacctccccggctgcggctccttctcctccctctccgtcctcatcatcgaccacaactccgtctcccacccctccgccgacttcttccagtcctgccagaagatgcgctccatcaaggccggcgacaaccccttccagtgcacctgcgagctccgcgagttcgtcaagaacatcgaccaggtctcctccgaggtcctcgagggctggcccgactcctacaagtgcgactaccccgagtcctaccgcggctcccccctcaaggacttccacatgtccgagctctcctgcaacatcaccctcctcatcgtcaccatcggcgccaccatgctcgtcctcgccgtcaccgtcacctccctctgcatctacctcgacctcccctggtacctccgcatggtctgccagtggacccagacccgccgccgcgcccgcaacatccccctcgaggagctccagcgcaacctccagttccacgccttcatctcctactccgagcacgactccgcctgggtcaagtccgagctcgtcccctacctcgagaaggaggacatccagatctgcctccacgagcgcaacttcgtccccggcaagtccatcgtcgagaacatcatcaactgcatcgagaagtcctacaagtccatcttcgtcctctcccccaacttcgtccagtccgagtggtgccactacgagctctacttcgcccaccacaacctcttccacgagggctccaacaacctcatcctcatcctcctcgagcccatcccccagaactccatccccaacaagtaccacaagctcaaggccctcatgacccagcgcacctacctccagtggcccaaggagaagtccaagcgcggcctcttctgggccaacatccgcgccgccttcaacatgaagctcaccctcgtcaccgagaacaacgacgtcaagtcctga

SEQ ID NO: 9680 - RNA, 2391 nt, synthetic construct
  misc_feature 1..2391: note = derived and/or modified sequence opt3 fromTLR6__Homo_sapiens__ABW37070
  source 1..2391: mol_type = other RNA
atgaccaaggacaaagagcccatcgtgaagtccttccactttgtgtgcctgatgattataatcgttggcacaaggattcagttctccgatgggaacgaatttgccgtggacaaatctaagagaggactcatccatgtacctaaagatcttccactgaagactaaggtgttggacacgtcacaaaattacattgctgagttacaggtcagtgatatgagcttcctgtccgaactaaccgtgctccggctgtctcacaaccgcatccagcttctggacttgtcggtttttaaattcaatcaggatctcgagtatctggacctgtcacataaccaactccagaagataagctgtcacccgatcgtgagttttcgacatttagatctgtccttcaatgactttaaagcacttcccatttgcaaggagttcggtaacttgtctcagctgaattttctaggcctcagcgccatgaaactgcagaaacttgatctgttgcctatcgcgcacctccacctgtcctacattttactggacctccgtaactattacatcaaggagaatgagacagaatcacttcaaatactgaacgctaagactttgcatctagtcttccacccaaccagtctgtttgccattcaggtgaatatcagcgtaaacacactcgggtgtctgcagcttaccaatattaagctgaacgatgacaattgccaggttttcatcaaattcttgtctgagctcactagaggacccacactgttaaactttaccctgaaccatatcgaaacgacttggaagtgtctagtgagggtcttccaatttctctggcctaaaccagtggagtatctgaatatttacaaccttaccataatcgagtccattcgggaagaggacttcacatattcaaagactaccttgaaagcactgacaatcgaacacataaccaatcaggtgtttctcttcagccagacggccctgtacactgtctttagtgagatgaacattatgatgcttacaatctctgatacccccttcatccacatgctgtgccctcatgctccatccacttttaagttcttgaattttacacaaaacgttttcaccgacagcatttttgaaaagtgttcgacgctcgtgaaactggagaccttaatcctgcagaagaatggcctaaaagatctcttcaaggtaggtctgatgacaaaagacatgccgtctcttgagattttggatgtgtcctggaactcactggaaagtgggcgccacaaggagaattgcacttgggtcgaaagcatagtggttctcaacctgtcctctaatatgttaaccgacagcgtgttcagatgtctgccccctaggatcaaggtccttgatttgcattcaaacaaaattaagagtgtgccaaaacaggtagttaagctcgaggcactgcaggaactaaatgtggcctttaactccctgacagacctccccggatgcggcagcttctcttcactgagtgtccttatcatcgatcacaatagcgtgtcccatccttctgctgactttttccaatcgtgtcagaaaatgcggagcattaaggccggcgataacccatttcagtgcacttgcgagttgcgcgagttcgtcaagaacatagaccaggtgtcctcagaagttctggaggggtggcccgacagttacaaatgtgattatccggaatcttaccgaggaagccctttaaaggactttcacatgtccgagctctcatgcaatatcaccctgcttattgtgacaatcggtgcgaccatgctggtattggcagtcactgtgacgagcctctgtatttatctggatctaccctggtacctgagaatggtttgccaatggacacagaccaggcggcgtgcccgcaacatcccactcgaagaactgcagagaaatcttcagttccacgcttttatatcttattccgagcatgacagtgcctgggtgaaaagcgaattggtcccttacctggagaaggaagatatccaaatttgtttacacgagaggaacttcgtgcccggcaaatctatcgtagagaatattatcaactgcatagaaaagtcctataagtcaatttttgtgctcagtccaaatttcgttcagagcgagtggtgtcattacgaactgtactttgcacaccacaaccttttccatgaggggtcgaataacctgatcctaattctcctggaacccatccctcagaatagcataccaaacaaatatcacaagttgaaagctctgatgactcagcggacctacttacaatggccgaaggagaaatctaagcgaggactcttctgggccaatatccgcgcggcctttaacatgaaactgacacttgtcaccgagaataacgacgtcaagagctga

SEQ ID NO: 9681 - RNA, 2391 nt, synthetic construct
  misc_feature 1..2391: note = derived and/or modified sequence opt4 fromTLR6__Homo_sapiens__ABW37070
  source 1..2391: mol_type = other RNA
atgaccaaggacaaggagcccatcgtgaagagcttccacttcgtgtgcctgatgatcatcatcgtgggcaccagaatccagttcagcgacggcaacgagttcgccgtggacaagagcaagagaggcctgatccacgtgcccaaggacctgcccctgaagaccaaggtgctggacaccagccagaactacatcgccgagctgcaggtgagcgacatgagcttcctgagcgagctgaccgtgctgagactgagccacaacagaatccagctgctggacctgagcgtgttcaagttcaaccaggacctggagtacctggacctgagccacaaccagctgcagaagatcagctgccaccccatcgtgagcttcagacacctggacctgagcttcaacgacttcaaggccctgcccatctgcaaggagttcggcaacctgagccagctgaacttcctgggcctgagcgccatgaagctgcagaagctggacctgctgcccatcgcccacctgcacctgagctacatcctgctggacctgagaaactactacatcaaggagaacgagaccgagagcctgcagatcctgaacgccaagaccctgcacctggtgttccaccccaccagcctgttcgccatccaggtgaacatcagcgtgaacaccctgggctgcctgcagctgaccaacatcaagctgaacgacgacaactgccaggtgttcatcaagttcctgagcgagctgaccagaggccccaccctgctgaacttcaccctgaaccacatcgagaccacctggaagtgcctggtgagagtgttccagttcctgtggcccaagcccgtggagtacctgaacatctacaacctgaccatcatcgagagcatcagagaggaggacttcacctacagcaagaccaccctgaaggccctgaccatcgagcacatcaccaaccaggtgttcctgttcagccagaccgccctgtacaccgtgttcagcgagatgaacatcatgatgctgaccatcagcgacacccccttcatccacatgctgtgcccccacgcccccagcaccttcaagttcctgaacttcacccagaacgtgttcaccgacagcatcttcgagaagtgcagcaccctggtgaagctggagaccctgatcctgcagaagaacggcctgaaggacctgttcaaggtgggcctgatgaccaaggacatgcccagcctggagatcctggacgtgagctggaacagcctggagagcggcagacacaaggagaactgcacctgggtggagagcatcgtggtgctgaacctgagcagcaacatgctgaccgacagcgtgttcagatgcctgccccccagaatcaaggtgctggacctgcacagcaacaagatcaagagcgtgcccaagcaggtggtgaagctggaggccctgcaggagctgaacgtggccttcaacagcctgaccgacctgcccggctgcggcagcttcagcagcctgagcgtgctgatcatcgaccacaacagcgtgagccaccccagcgccgacttcttccagagctgccagaagatgagaagcatcaaggccggcgacaaccccttccagtgcacctgcgagctgagagagttcgtgaagaacatcgaccaggtgagcagcgaggtgctggagggctggcccgacagctacaagtgcgactaccccgagagctacagaggcagccccctgaaggacttccacatgagcgagctgagctgcaacatcaccctgctgatcgtgaccatcggcgccaccatgctggtgctggccgtgaccgtgaccagcctgtgcatctacctggacctgccctggtacctgagaatggtgtgccagtggacccagaccagaagaagagccagaaacatccccctggaggagctgcagagaaacctgcagttccacgccttcatcagctacagcgagcacgacagcgcctgggtgaagagcgagctggtgccctacctggagaaggaggacatccagatctgcctgcacgagagaaacttcgtgcccggcaagagcatcgtggagaacatcatcaactgcatcgagaagagctacaagagcatcttcgtgctgagccccaacttcgtgcagagcgagtggtgccactacgagctgtacttcgcccaccacaacctgttccacgagggcagcaacaacctgatcctgatcctgctggagcccatcccccagaacagcatccccaacaagtaccacaagctgaaggccctgatgacccagagaacctacctgcagtggcccaaggagaagagcaagagaggcctgttctgggccaacatcagagccgccttcaacatgaagctgaccctggtgaccgagaacaacgacgtgaagagctga

SEQ ID NO: 9682 - RNA, 2391 nt, synthetic construct
  misc_feature 1..2391: note = derived and/or modified sequence opt5 fromTLR6__Homo_sapiens__ABW37070
  source 1..2391: mol_type = other RNA
atgaccaaggacaaagagcccatcgtgaagtccttccactttgtctgcctgatgattatcattgttggcacaagaatccagttctccgatgggaacgaatttgccgtggacaaatctaagcggggactcattcatgtgcctaaagatctgccgcttaagacgaaggtcctggacaccagccaaaattacatcgctgagctccaggtgtccgatatgtctttcctgagcgaacttacagttctgcgcctctcccacaacagaatccagctgctggacctctctgtgtttaaattcaatcaggatctggagtatcttgacctgagccataaccaactccagaagatttcctgtcaccccatcgtcagctttcggcatctggatctttctttcaatgactttaaagccctgcctatttgcaaggagttcggcaacctctcccagctgaattttctggggctcagcgcgatgaaactgcagaagctcgatctgctccccatcgctcatctgcacctttcttacattctgctcgacctgcgcaactattacatcaaggagaatgagaccgaatccctgcaaattctcaacgccaaaacactgcaccttgtgttccaccctaccagcctgtttgccatccaggttaatatctctgtgaacacactcggatgtctgcagcttaccaatattaagctgaacgatgacaattgccaggtcttcatcaaattcctctccgagctgacgagaggccccaccctgctcaactttacactgaaccatattgaaaccacatggaagtgtcttgtgcgggtgttccaatttctgtggcctaaaccggtcgagtatctcaatatctacaacctgaccattatcgagagcatccgcgaagaggacttcacgtattccaagacaaccctgaaagctcttacaattgaacacatcaccaatcaggtttttctcttctctcagaccgccctgtacacagtgtttagcgagatgaacattatgatgctgacgatctccgatacccccttcattcacatgctctgccctcatgctcccagcacatttaagttcctgaattttacccaaaacgtgttcacagactctatctttgaaaagtgttccacccttgtcaaactggagacgctcatcctgcagaagaatgggctgaaagatcttttcaaggtgggactcatgacaaaagacatgcctagcctggagattctggatgtttcttggaacagcctcgaatccggcagacacaaggagaattgcacctgggtggaatctatcgtcgtgctgaaccttagctccaatatgctgaccgacagcgttttccggtgtcttcccccgcgcattaaggtgctggatctgcattctaacaaaatcaagtccgtccctaaacaggtggtcaaacttgaggccctccaggaactgaatgtggcgtttaacagcctgacagacctccccggctgcgggtctttctccagcctgtccgttcttattatcgatcacaattctgtgagccatccttccgccgactttttccaatcttgtcagaagatgagaagcattaaggctggagataacccctttcagtgtacctgcgagctgcgggagttcgtcaagaacatcgaccaggtgtccagcgaagttctcgagggctggcccgactcttacaaatgcgattatcctgaatcctaccgcgggagcccgctgaaggactttcacatgtctgagctgtcctgcaatatcacacttctcattgtgacgatcggagccaccatgctggtcctggctgtgacagtgaccagcctctgtatttatctggatcttccctggtacctgagaatggtttgccaatggacacagacccggcgcagagcccggaacatccctctcgaagaactgcagagaaatctgcagttccacgcgtttatttcttatagcgagcatgactccgcctgggtcaaaagcgaacttgtgccctacctggagaaggaagatatccaaatctgtctccacgagcgcaacttcgtgcctggcaaatctattgtcgagaatatcattaactgcatcgaaaagtcctataagagcatttttgtgctgtcccccaatttcgttcagtctgagtggtgtcattacgaactctactttgctcaccacaacctgttccatgaggggagcaataaccttatcctgatcctcctggaaccgattcctcagaatagcatccccaacaaatatcacaagctgaaagcccttatgacgcagcggacctacctgcaatggcctaaggagaaatctaagagaggactcttctgggctaatattcgcgccgcctttaacatgaaactgacactcgtgaccgagaataacgacgtcaagagctga

SEQ ID NO: 9683 - protein, 796 aa, synthetic construct [sequence omitted]

SEQ ID NO: 9684 - RNA, 2391 nt, synthetic construct
  misc_feature 1..2391: note = TLR6__Homo_sapiens__ABW37072
  source 1..2391: mol_type = other RNA
atgaccaaagacaaagaacctattgttaaaagcttccattttgtttgccttatgatcataatagttggaaccagaatccagttctccgacggaaatgaatttgcagtagacaagtcaaaaagaggtcttattcatgttccaaaagacctaccgctgaaaaccaaagtcttagatatgtctcagaactacatcgctgagcttcaggtctctgacatgagctttctatcagagttgacagttttgagactttcccataacagaatccagctacttgatttaagtgttttcaagttcaaccaggatttagaatatttggatttatctcataatcagttgcaaaagatatcctgccatcctactgtgagtttcaggcatttagatctctcattcaatgatttcaaggccctgcccatctgtaaggaatttggcaacttatcacaactgaatttcttgggattgagtgctatgaagctgcaaaaattagatttgctgccaattgctcacttgcatctaagttatatccttctggatttaagaaattattatataaaagaaaatgagacagaaagtctacaaattctgaatgcaaaaacccttcaccttgtttttcacccaactagtttattcgctatccaagtgaacatatcagttaatactttagggtgcttacaactgactaatattaaattgaatgatgacaactgtcaagttttcattaaatttttatcagaactcaccagaggtccaaccttactgaattttaccctcaaccacatagaaacgacttggaaatgcctggtcagagtctttcaatttctttggcccaaacctgtggaatatctcaatatttacaatttaacaataattgaaagcattcgtgaagaagattttacttattctaaaacgacattgaaagcattgacaatagaacatatcacgaaccaagtttttctgttttcacagacagctttgtacaccgtgttttctgagatgaacattatgatgttaaccatttcagatacaccttttatacacatgctgtgtcctcatgcaccaagcacattcaagtttttgaactttacgcagaacgttttcacagatagtatttttgaaaaatgttccacgttagttaaattggagacacttatcttacaaaagaatggattaaaagaccttttcaaagtaggtctcatgacgaaggatatgccttctttggaaatactggatgttagctggaattctttggaatctggtagacataaggaaaactgcacttgggttgagagtatagtggtgttaaatttgtcttcaaatatgcttactgactctgttttcagatgtttacctcccaggatcaaggtacttgatcttcacagcaataaaataaagagcattcctaaacaagtcgtaaaactggaagctttgcaagaactcaatgttgctttcaattctttaactgaccttcctggatgtggcagctttagcagcctttctgtattgatcattgatcacaattcagtttcccacccatcggctgatttcttccagagctgccagaagatgaggtcaataaaagcaggggacaatccattccaatgtacctgtgagctaagagaatttgtcaaaaatatagaccaagtatcaagtgaagtgttagagggctggcctgattcttataagtgtgactacccagaaagttatagaggaagcccactaaaggactttcacatgtctgaattatcctgcaacataactctgctgatcgtcaccatcggtgccaccatgctggtgttggctgtgactgtgacctccctctgcatctacttggatctgccctggtatctcaggatggtgtgccagtggacccagactcggcgcagggccaggaacatacccttagaagaactccaaagaaacctccagtttcatgcttttatttcatatagtgaacatgattctgcctgggtgaaaagtgaattggtaccttacctagaaaaagaagatatacagatttgtcttcatgagagaaactttgtccctggcaagagcattgtggaaaatatcatcaactgcattgagaagagttacaagtccatctttgttttgtctcccaactttgtccagagtgagtggtgccattacgaactctattttgcccatcacaatctctttcatgaaggatctaataacttaatcctcatcttactggaacccattccacagaacagcattcccaacaagtaccacaagctgaaggctctcatgacgcagcggacttatttgcagtggcccaaggagaaaagcaaacgtgggctcttttgggctaacattagagccgcttttaatatgaaattaacactagtcactgaaaacaatgatgtgaaatcttaa

SEQ ID NO: 9685 - RNA, 2391 nt, synthetic construct
  misc_feature 1..2391: note = derived and/or modified sequence opt1 fromTLR6__Homo_sapiens__ABW37072
  source 1..2391: mol_type = other RNA
atgaccaaggacaaggagcccatcgtcaagagcttccacttcgtgtgcctgatgatcatcatcgtgggcacccgcatccagttctccgacgggaacgagttcgccgtggacaagagcaagcggggcctcatccacgtcccgaaggacctgcccctgaagacgaaggtgctcgacatgtcccagaactacatcgccgagctccaggtgagcgacatgtccttcctgagcgagctgaccgtcctgcgcctgtcccacaaccggatccagctcctggacctgagcgtgttcaagttcaaccaggacctcgagtacctggacctgtcccacaaccagctccagaagatcagctgccaccccaccgtgtccttccgccacctggacctgagcttcaacgacttcaaggcgctccccatctgcaaggagttcgggaacctgtcccagctgaacttcctcggcctgagcgccatgaagctgcagaagctcgacctgctgccgatcgcccacctccacctgtcctacatcctgctcgacctgcggaactactacatcaaggagaacgagaccgagagcctgcagatcctcaacgccaagacgctgcacctggtcttccaccccacctccctcttcgccatccaggtgaacatcagcgtgaacaccctggggtgcctgcagctcaccaacatcaagctgaacgacgacaactgccaggtcttcatcaagttcctgtccgagctcacgcgcggccccaccctgctgaacttcaccctcaaccacatcgagaccacgtggaagtgcctggtgcgggtgttccagttcctgtggcccaagccggtcgagtacctcaacatctacaacctgaccatcatcgagagcatccgcgaggaggacttcacctacagcaagaccacgctgaaggcgctgaccatcgagcacatcaccaaccaggtgttcctcttctcccagaccgccctgtacacggtgttcagcgagatgaacatcatgatgctgaccatctccgacacccccttcatccacatgctctgcccccacgcccccagcaccttcaagttcctgaacttcacgcagaacgtcttcaccgactccatcttcgagaagtgcagcaccctggtgaagctcgagaccctgatcctgcagaagaacggcctcaaggacctgttcaaggtggggctgatgacgaaggacatgccgtccctcgagatcctggacgtcagctggaactccctggagagcggccggcacaaggagaactgcacctgggtggagtccatcgtggtcctcaacctgagctccaacatgctgaccgacagcgtgttccgctgcctcccgccccggatcaaggtcctggacctgcactccaacaagatcaagagcatccccaagcaggtcgtgaagctcgaggccctgcaggagctgaacgtggcgttcaactccctcaccgacctgcccgggtgcggcagcttctccagcctgagcgtgctcatcatcgaccacaactccgtgagccacccctccgccgacttcttccagagctgccagaagatgcgctccatcaaggccggggacaaccccttccagtgcacgtgcgagctgcgggagttcgtcaagaacatcgaccaggtgagctccgaggtgctggagggctggcccgacagctacaagtgcgactacccggagtcctaccgcggcagccccctcaaggacttccacatgtccgagctgagctgcaacatcaccctgctcatcgtcaccatcggggccaccatgctggtgctggccgtgacggtcacctccctctgcatctacctggacctgccctggtacctccggatggtgtgccagtggacccagacccgccggcgcgcgcggaacatccccctggaggagctgcagcgcaacctccagttccacgccttcatcagctactccgagcacgacagcgcctgggtgaagtccgagctggtcccgtacctggagaaggaggacatccagatctgcctccacgagcggaacttcgtgcccggcaagagcatcgtggagaacatcatcaactgcatcgagaagtcctacaagagcatcttcgtcctgagccccaacttcgtgcagtccgagtggtgccactacgagctgtacttcgcccaccacaacctcttccacgaggggagcaacaacctgatcctgatcctcctggagcccatcccgcagaactccatccccaacaagtaccacaagctgaaggccctcatgacccagcgcacgtacctgcagtggcccaaggagaagtccaagcgcggcctgttctgggcgaacatccgggccgccttcaacatgaagctcaccctggtgaccgagaacaacgacgtcaagagctga

SEQ ID NO: 9686 - RNA, 2391 nt, synthetic construct
  misc_feature 1..2391: note = derived and/or modified sequence opt2 fromTLR6__Homo_sapiens__ABW37072
  source 1..2391: mol_type = other RNA
atgaccaaggacaaggagcccatcgtcaagtccttccacttcgtctgcctcatgatcatcatcgtcggcacccgcatccagttctccgacggcaacgagttcgccgtcgacaagtccaagcgcggcctcatccacgtccccaaggacctccccctcaagaccaaggtcctcgacatgtcccagaactacatcgccgagctccaggtctccgacatgtccttcctctccgagctcaccgtcctccgcctctcccacaaccgcatccagctcctcgacctctccgtcttcaagttcaaccaggacctcgagtacctcgacctctcccacaaccagctccagaagatctcctgccaccccaccgtctccttccgccacctcgacctctccttcaacgacttcaaggccctccccatctgcaaggagttcggcaacctctcccagctcaacttcctcggcctctccgccatgaagctccagaagctcgacctcctccccatcgcccacctccacctctcctacatcctcctcgacctccgcaactactacatcaaggagaacgagaccgagtccctccagatcctcaacgccaagaccctccacctcgtcttccaccccacctccctcttcgccatccaggtcaacatctccgtcaacaccctcggctgcctccagctcaccaacatcaagctcaacgacgacaactgccaggtcttcatcaagttcctctccgagctcacccgcggccccaccctcctcaacttcaccctcaaccacatcgagaccacctggaagtgcctcgtccgcgtcttccagttcctctggcccaagcccgtcgagtacctcaacatctacaacctcaccatcatcgagtccatccgcgaggaggacttcacctactccaagaccaccctcaaggccctcaccatcgagcacatcaccaaccaggtcttcctcttctcccagaccgccctctacaccgtcttctccgagatgaacatcatgatgctcaccatctccgacacccccttcatccacatgctctgcccccacgccccctccaccttcaagttcctcaacttcacccagaacgtcttcaccgactccatcttcgagaagtgctccaccctcgtcaagctcgagaccctcatcctccagaagaacggcctcaaggacctcttcaaggtcggcctcatgaccaaggacatgccctccctcgagatcctcgacgtctcctggaactccctcgagtccggccgccacaaggagaactgcacctgggtcgagtccatcgtcgtcctcaacctctcctccaacatgctcaccgactccgtcttccgctgcctccccccccgcatcaaggtcctcgacctccactccaacaagatcaagtccatccccaagcaggtcgtcaagctcgaggccctccaggagctcaacgtcgccttcaactccctcaccgacctccccggctgcggctccttctcctccctctccgtcctcatcatcgaccacaactccgtctcccacccctccgccgacttcttccagtcctgccagaagatgcgctccatcaaggccggcgacaaccccttccagtgcacctgcgagctccgcgagttcgtcaagaacatcgaccaggtctcctccgaggtcctcgagggctggcccgactcctacaagtgcgactaccccgagtcctaccgcggctcccccctcaaggacttccacatgtccgagctctcctgcaacatcaccctcctcatcgtcaccatcggcgccaccatgctcgtcctcgccgtcaccgtcacctccctctgcatctacctcgacctcccctggtacctccgcatggtctgccagtggacccagacccgccgccgcgcccgcaacatccccctcgaggagctccagcgcaacctccagttccacgccttcatctcctactccgagcacgactccgcctgggtcaagtccgagctcgtcccctacctcgagaaggaggacatccagatctgcctccacgagcgcaacttcgtccccggcaagtccatcgtcgagaacatcatcaactgcatcgagaagtcctacaagtccatcttcgtcctctcccccaacttcgtccagtccgagtggtgccactacgagctctacttcgcccaccacaacctcttccacgagggctccaacaacctcatcctcatcctcctcgagcccatcccccagaactccatccccaacaagtaccacaagctcaaggccctcatgacccagcgcacctacctccagtggcccaaggagaagtccaagcgcggcctcttctgggccaacatccgcgccgccttcaacatgaagctcaccctcgtcaccgagaacaacgacgtcaagtcctga

SEQ ID NO: 9687 - RNA, 2391 nt, synthetic construct
  misc_feature 1..2391: note = derived and/or modified sequence opt3 fromTLR6__Homo_sapiens__ABW37072
  source 1..2391: mol_type = other RNA
atgaccaaggacaaagagcccatcgtgaagtccttccactttgtctgcctgatgattataatcgttggcacaaggattcagttctccgatgggaacgaatttgccgtggacaaatctaagagaggactcatccatgtacctaaagatcttccactgaagactaaggtgttggacatgtcacaaaattacattgctgagttacaggtcagtgatatgagcttcctgtccgaactaacggtgctccggctgtctcacaaccgcatccagcttctggacttgtcggtttttaaattcaatcaggatctcgagtatctggacctgtcacataaccaactccagaagataagctgtcacccgaccgtgagttttcgacatttagatctgtccttcaatgactttaaagcacttcccatctgcaaggagttcggtaacttgtctcagctgaattttctaggcctcagcgccatgaaactgcagaaacttgatctgttgcctattgcgcacctccacctgtcctacatcttactggacctccgtaactattacattaaggagaatgagacagaatcacttcaaatcctgaacgctaagactttgcatctagtcttccacccaaccagtctgtttgccatacaggtgaatattagcgtaaacacactcgggtgtctgcagcttaccaatatcaagctgaacgatgacaattgccaggttttcattaaattcttgtctgagctcactagaggacccacactgttaaactttaccctgaaccatatcgaaacgacttggaagtgtctagtgagggtcttccaatttctctggcctaaaccagtggagtatctgaatatctacaaccttaccattatagagtccatccgggaagaggacttcacatattcaaagactaccttgaaagcactgacaattgaacacatcaccaatcaggtgtttctcttcagccagacggccctgtacactgtctttagtgagatgaacataatgatgcttacaatttctgatacccccttcatccacatgctgtgccctcatgctccatccacttttaagttcttgaattttacacaaaacgttttcaccgacagcatctttgaaaagtgttcgacgctcgtgaaactggagaccttaattctgcagaagaatggcctaaaagatctcttcaaggtaggtctgatgacaaaagacatgccgtctcttgagatcttggatgtgtcctggaactcactggaaagtgggcgccacaaggagaattgcacttgggtcgaaagcattgtggttctcaacctgtcctctaatatgttaaccgacagcgtgttcagatgtctgccccctaggataaaggtccttgatttgcattcaaacaaaatcaagagtattccaaaacaggtggtaaagctcgaggcactgcaggaactaaatgttgcctttaactccctgacagacctccccggatgcggcagcttctcttcactgagtgtgcttatcatcgatcacaatagcgtctcccatccttctgctgactttttccaatcgtgtcagaaaatgcggagcattaaggccggcgataacccatttcagtgcacttgcgagttgcgcgagttcgtgaagaacatagaccaggtctcctcagaagtgctggaggggtggcccgacagttacaaatgtgattatccggaatcttaccgaggaagccctttaaaggactttcacatgtccgagctctcatgcaatatcaccctgcttattgttacaatcggtgcgaccatgctggtgttggcagtaactgtcacgagcctctgtatttatctggatctaccctggtacctgagaatggtgtgccaatggacacagaccaggcggcgtgcccgcaacatcccactcgaagaactgcagagaaatcttcagttccacgcttttatatcttattccgagcatgacagtgcctgggttaaaagcgaattggtgccttacctggagaaggaagatatccaaatttgtttacacgagaggaacttcgtccccggcaaatctatcgtggagaatattatcaactgcatagaaaagtcctataagtcaatttttgtactcagtccaaatttcgtgcagagcgagtggtgtcattacgaactgtactttgcacaccacaaccttttccatgaggggtcgaataacctgatcctaattctcctggaacccatccctcagaatagcataccaaacaaatatcacaagttgaaagctctgatgactcagcggacctacttacaatggccgaaggagaaatctaagcgaggactcttctgggccaatatccgcgcggcctttaacatgaaactgacacttgttaccgagaataacgacgtcaagagctga

SEQ ID NO: 9688 - RNA, 2391 nt, synthetic construct
  misc_feature 1..2391: note = derived and/or modified sequence opt4 fromTLR6__Homo_sapiens__ABW37072
  source 1..2391: mol_type = other RNA
atgaccaaggacaaggagcccatcgtgaagagcttccacttcgtgtgcctgatgatcatcatcgtgggcaccagaatccagttcagcgacggcaacgagttcgccgtggacaagagcaagagaggcctgatccacgtgcccaaggacctgcccctgaagaccaaggtgctggacatgagccagaactacatcgccgagctgcaggtgagcgacatgagcttcctgagcgagctgaccgtgctgagactgagccacaacagaatccagctgctggacctgagcgtgttcaagttcaaccaggacctggagtacctggacctgagccacaaccagctgcagaagatcagctgccaccccaccgtgagcttcagacacctggacctgagcttcaacgacttcaaggccctgcccatctgcaaggagttcggcaacctgagccagctgaacttcctgggcctgagcgccatgaagctgcagaagctggacctgctgcccatcgcccacctgcacctgagctacatcctgctggacctgagaaactactacatcaaggagaacgagaccgagagcctgcagatcctgaacgccaagaccctgcacctggtgttccaccccaccagcctgttcgccatccaggtgaacatcagcgtgaacaccctgggctgcctgcagctgaccaacatcaagctgaacgacgacaactgccaggtgttcatcaagttcctgagcgagctgaccagaggccccaccctgctgaacttcaccctgaaccacatcgagaccacctggaagtgcctggtgagagtgttccagttcctgtggcccaagcccgtggagtacctgaacatctacaacctgaccatcatcgagagcatcagagaggaggacttcacctacagcaagaccaccctgaaggccctgaccatcgagcacatcaccaaccaggtgttcctgttcagccagaccgccctgtacaccgtgttcagcgagatgaacatcatgatgctgaccatcagcgacacccccttcatccacatgctgtgcccccacgcccccagcaccttcaagttcctgaacttcacccagaacgtgttcaccgacagcatcttcgagaagtgcagcaccctggtgaagctggagaccctgatcctgcagaagaacggcctgaaggacctgttcaaggtgggcctgatgaccaaggacatgcccagcctggagatcctggacgtgagctggaacagcctggagagcggcagacacaaggagaactgcacctgggtggagagcatcgtggtgctgaacctgagcagcaacatgctgaccgacagcgtgttcagatgcctgccccccagaatcaaggtgctggacctgcacagcaacaagatcaagagcatccccaagcaggtggtgaagctggaggccctgcaggagctgaacgtggccttcaacagcctgaccgacctgcccggctgcggcagcttcagcagcctgagcgtgctgatcatcgaccacaacagcgtgagccaccccagcgccgacttcttccagagctgccagaagatgagaagcatcaaggccggcgacaaccccttccagtgcacctgcgagctgagagagttcgtgaagaacatcgaccaggtgagcagcgaggtgctggagggctggcccgacagctacaagtgcgactaccccgagagctacagaggcagccccctgaaggacttccacatgagcgagctgagctgcaacatcaccctgctgatcgtgaccatcggcgccaccatgctggtgctggccgtgaccgtgaccagcctgtgcatctacctggacctgccctggtacctgagaatggtgtgccagtggacccagaccagaagaagagccagaaacatccccctggaggagctgcagagaaacctgcagttccacgccttcatcagctacagcgagcacgacagcgcctgggtgaagagcgagctggtgccctacctggagaaggaggacatccagatctgcctgcacgagagaaacttcgtgcccggcaagagcatcgtggagaacatcatcaactgcatcgagaagagctacaagagcatcttcgtgctgagccccaacttcgtgcagagcgagtggtgccactacgagctgtacttcgcccaccacaacctgttccacgagggcagcaacaacctgatcctgatcctgctggagcccatcccccagaacagcatccccaacaagtaccacaagctgaaggccctgatgacccagagaacctacctgcagtggcccaaggagaagagcaagagaggcctgttctgggccaacatcagagccgccttcaacatgaagctgaccctggtgaccgagaacaacgacgtgaagagctga

SEQ ID NO: 9689 - RNA, 2391 nt, synthetic construct
  misc_feature 1..2391: note = derived and/or modified sequence opt5 fromTLR6__Homo_sapiens__ABW37072
  source 1..2391: mol_type = other RNA
atgaccaaggacaaagagcccatcgtgaagtccttccactttgtgtgcctgatgattatcattgttggcacaagaatccagttctccgatgggaacgaatttgccgtggacaaatctaagcggggactcattcatgtgcctaaagatctgccgcttaagacgaaggtcctggacatgagccaaaattacatcgctgagctccaggtgtccgatatgtctttcctgagcgaacttaccgttctgcgcctctcccacaacagaatccagctgctggacctctctgtgtttaaattcaatcaggatctggagtatcttgacctgagccataaccaactccagaagatttcctgtcaccccacagtcagctttcggcatctggatctttctttcaatgactttaaagccctgcctatctgcaaggagttcggcaacctctcccagctgaattttctggggctcagcgcgatgaaactgcagaagctcgatctgctccccattgctcatctgcacctttcttacatcctgctcgacctgcgcaactattacattaaggagaatgagaccgaatccctgcaaatcctcaacgccaaaacactgcaccttgtgttccaccctaccagcctgtttgccattcaggttaatatctctgtgaacacactcggatgtctgcagcttaccaatatcaagctgaacgatgacaattgccaggtcttcattaaattcctctccgagctgacgagaggccccaccctgctcaactttacactgaaccatatcgaaaccacatggaagtgtcttgtgcgggtgttccaatttctgtggcctaaaccggtcgagtatctcaatatttacaacctgaccatcattgagagcatccgcgaagaggacttcacgtattccaagacaaccctgaaagctcttacaatcgaacacattaccaatcaggtttttctcttctctcagaccgccctgtacacagtgtttagcgagatgaacatcatgatgctgacgatttccgatacccccttcatccacatgctctgccctcatgctcccagcacatttaagttcctgaattttacccaaaacgtgttcacagactctatttttgaaaagtgttccacccttgtcaaactggagacgctcatcctgcagaagaatgggctgaaagatcttttcaaggtgggactcatgacaaaagacatgcctagcctggagatcctggatgtttcttggaacagcctcgaatccggcagacacaaggagaattgcacctgggtggaatctattgtcgtgctgaaccttagctccaatatgctgaccgacagcgttttccggtgtcttcccccgcgcatcaaggtgctggatctgcattctaacaaaattaagtccatccctaaacaggtcgtgaaacttgaggccctccaggaactgaatgtcgcgtttaacagcctgacagacctccccggctgcgggtctttctccagcctgtccgtgcttattatcgatcacaattctgttagccatccttccgccgactttttccaatcttgtcagaagatgagaagcattaaggctggagataacccctttcagtgtacctgcgagctgcgggagttcgtgaagaacatcgaccaggtctccagcgaagtgctcgagggctggcccgactcttacaaatgcgattatcctgaatcctaccgcgggagcccgctgaaggactttcacatgtctgagctgtcctgcaatatcacacttctcattgttacgatcggagccaccatgctggtgctggctgtcacagtgaccagcctctgtatttatctggatcttccctggtacctgagaatggtgtgccaatggacacagacccggcgcagagcccggaacatccctctcgaagaactgcagagaaatctgcagttccacgcgtttatttcttatagcgagcatgactccgcctgggttaaaagcgaacttgtcccctacctggagaaggaagatatccaaatctgtctccacgagcgcaacttcgtgcctggcaaatctattgtggagaatatcattaactgcatcgaaaagtcctataagagcatttttgtcctgtcccccaatttcgtgcagtctgagtggtgtcattacgaactctactttgctcaccacaacctgttccatgaggggagcaataaccttatcctgatcctcctggaaccgattcctcagaatagcatccccaacaaatatcacaagctgaaagcccttatgacgcagcggacctacctgcaatggcctaaggagaaatctaagagaggactcttctgggctaatattcgcgccgcctttaacatgaaactgacactcgttaccgagaataacgacgtcaagagctga

SEQ ID NO: 9690 - protein, 796 aa, synthetic construct [sequence omitted]

SEQ ID NO: 9691 - RNA, 2391 nt, synthetic construct
  misc_feature 1..2391: note = TLR6__Homo_sapiens__ABW37073
  source 1..2391: mol_type = other RNA
atgaccaaagacaaagaacctattgttaaaagcttccattttgtttgccttatgatcataatagttggaaccagaatccagttctccgacggaaatgaatttgcagtagacaagtcaaaaagaggtcttattcatgttccaaaagacctaccgctgaaaaccaaagtcttagatatgtctcagaactacatcgctgagcttcaggtctctgacatgagctttctatcagagttgacagttttgagactttcccataacagaatccagctacttgatttaagtgttttcaagttcaaccaggatttagaatatttggatttatctcataatcagttgcaaaagatatcctgccatcctactgtgagtttcaggcatttagatctctcattcaatgatttcaaggccctgcccatctgtaaggaatttggcaacttatcacaactgaatttcttgggattgagtgctatgaagctgcaaaaattagatttgctgccaattgctcacttgcatctaagttatatccttctggatttaagaaattattatataaaagaaaatgagacagaaagtctacaaattctgaatgcaaaaacccttcaccttgtttttcacccaactagtttattcgctatccaagtgaacatatcagttaatactttagggtgcttacaactgactaatattaaattgaatgatgacaactgtcaagttttcattaaatttttatcagaactcaccagaggtccaaccttactgaattttaccctcaaccacatagaaacgacttggaaatgcctggtcagagtctttcaatttctttggcccaaacctgtggaatatctcaatatttacaatttaacaataattgaaagcattcgtgaagaagattttacttattctaaaacgacattgaaagcattgacaatagaacatatcacgaaccaagtttttctgttttcacagacagctttgtacaccatgttttctgagatgaacattatgatgttaaccatttcagatacaccttttatacacatgctgtgtcctcatgcaccaagcacattcaagtttttgaactttacgcagaacgttttcacagatagtatttttgaaaaatgttccacgttagttaaattggagacacttatcttacaaaagaatggattaaaagaccttttcaaagtaggtctcatgacgaaggatatgccttctttggaaatactggatgttagctggaattctttggaatctggtagacataaggaaaactgcacttgggttgagagtatagtggtgttaaatttgtcttcaaatatgcttactgactctgttttcagatgtttacctcccaggatcaaggtacttgatcttcacagcaataaaataaagagcgttcctaaacaagtcgtaaaactggaagctttgcaagaactcaatgttgctttcaattctttaactgaccttcctggatgtggcagctttagcagcctttctgtattgatcattgatcacaattcagtttcccacccatcggctgatttcttccagagctgccagaagatgaggtcaataaaagcaggggacaatccattccaatgtacctgtgagctaagagaatttgtcaaaaatatagaccaagtatcaagtgaagtgttagagggctggcctgattcttataagtgtgactacccagaaagttatagaggaagcccactaaaggactttcacatgtctgaattatcctgcaacataactctgctgatcgtcaccatcggtgccaccatgctggtgttggctgtgactgtgacctccctctgcatctacttggatctgccctggtatctcaggatggtgtgccagtggacccagactcggcgcagggccaggaacatacccttagaagaactccaaagaaacctccagtttcatgcttttatttcatatagtgaacatgattctgcctgggtgaaaagtgaattggtaccttacctagaaaaagaagatatacagatttgtcttcatgagagaaactttgtccctggcaagagcattgtggaaaatatcatcaactgcattgagaagagttacaagtccatctttgttttgtctcccaactttgtccagagtgagtggtgccattacgaactctattttgcccatcacaatctctttcatgaaggatctaataacttaatcctcatcttactggaacccattccacagaacagcattcccaacaagtaccacaagctgaaggctctcatgacgcagcggacttatttgcagtggcccaaggagaaaagcaaacgtgggctcttttgggctaacattagagccgcttttaatatgaaattaacactagtcactgaaaacaatgatgtgaaatcttaa

SEQ ID NO: 9692 - RNA, 2391 nt, synthetic construct
  misc_feature 1..2391: note = derived and/or modified sequence opt1 fromTLR6__Homo_sapiens__ABW37073
  source 1..2391: mol_type = other RNA
atgaccaaggacaaggagcccatcgtcaagagcttccacttcgtgtgcctgatgatcatcatcgtgggcacccgcatccagttctccgacgggaacgagttcgccgtggacaagagcaagcggggcctcatccacgtcccgaaggacctgcccctgaagacgaaggtgctcgacatgtcccagaactacatcgccgagctccaggtgagcgacatgtccttcctgagcgagctgaccgtcctgcgcctgtcccacaaccggatccagctcctggacctgagcgtgttcaagttcaaccaggacctcgagtacctggacctgtcccacaaccagctccagaagatcagctgccaccccaccgtgtccttccgccacctggacctgagcttcaacgacttcaaggcgctccccatctgcaaggagttcgggaacctgtcccagctgaacttcctcggcctgagcgccatgaagctgcagaagctcgacctgctgccgatcgcccacctccacctgtcctacatcctgctcgacctgcggaactactacatcaaggagaacgagaccgagagcctgcagatcctcaacgccaagacgctgcacctggtcttccaccccacctccctcttcgccatccaggtgaacatcagcgtgaacaccctggggtgcctgcagctcaccaacatcaagctgaacgacgacaactgccaggtcttcatcaagttcctgtccgagctcacgcgcggccccaccctgctgaacttcaccctcaaccacatcgagaccacgtggaagtgcctggtgcgggtgttccagttcctgtggcccaagccggtcgagtacctcaacatctacaacctgaccatcatcgagagcatccgcgaggaggacttcacctacagcaagaccacgctgaaggcgctgaccatcgagcacatcaccaaccaggtgttcctcttctcccagaccgccctgtacacgatgttcagcgagatgaacatcatgatgctgaccatctccgacacccccttcatccacatgctctgcccccacgcccccagcaccttcaagttcctgaacttcacgcagaacgtgttcaccgactccatcttcgagaagtgcagcaccctggtcaagctcgagaccctgatcctgcagaagaacggcctcaaggacctgttcaaggtggggctgatgacgaaggacatgccgtccctcgagatcctggacgtgagctggaactccctggagagcggccggcacaaggagaactgcacctgggtcgagtccatcgtggtgctcaacctgagctccaacatgctgaccgacagcgtcttccgctgcctcccgccccggatcaaggtgctggacctgcactccaacaagatcaagagcgtccccaagcaggtcgtgaagctcgaggccctgcaggagctgaacgtggcgttcaactccctcaccgacctgcccgggtgcggcagcttctccagcctgagcgtgctcatcatcgaccacaactccgtgagccacccctccgccgacttcttccagagctgccagaagatgcgctccatcaaggccggggacaaccccttccagtgcacgtgcgagctgcgggagttcgtcaagaacatcgaccaggtgagctccgaggtgctggagggctggcccgacagctacaagtgcgactacccggagtcctaccgcggcagccccctcaaggacttccacatgtccgagctgagctgcaacatcaccctgctcatcgtcaccatcggggccaccatgctggtgctggccgtgacggtcacctccctctgcatctacctggacctgccctggtacctccggatggtgtgccagtggacccagacccgccggcgcgcgcggaacatccccctggaggagctgcagcgcaacctccagttccacgccttcatcagctactccgagcacgacagcgcctgggtgaagtccgagctggtcccgtacctggagaaggaggacatccagatctgcctccacgagcggaacttcgtgcccggcaagagcatcgtggagaacatcatcaactgcatcgagaagtcctacaagagcatcttcgtcctgagccccaacttcgtgcagtccgagtggtgccactacgagctgtacttcgcccaccacaacctcttccacgaggggagcaacaacctgatcctgatcctcctggagcccatcccgcagaactccatccccaacaagtaccacaagctgaaggccctcatgacccagcgcacgtacctgcagtggcccaaggagaagtccaagcgcggcctgttctgggcgaacatccgggccgccttcaacatgaagctcaccctggtgaccgagaacaacgacgtcaagagctga

SEQ ID NO: 9693 - RNA, 2391 nt, synthetic construct
  misc_feature 1..2391: note = derived and/or modified sequence opt2 fromTLR6__Homo_sapiens__ABW37073
  source 1..2391: mol_type = other RNA
atgaccaaggacaaggagcccatcgtcaagtccttccacttcgtctgcctcatgatcatcatcgtcggcacccgcatccagttctccgacggcaacgagttcgccgtcgacaagtccaagcgcggcctcatccacgtccccaaggacctccccctcaagaccaaggtcctcgacatgtcccagaactacatcgccgagctccaggtctccgacatgtccttcctctccgagctcaccgtcctccgcctctcccacaaccgcatccagctcctcgacctctccgtcttcaagttcaaccaggacctcgagtacctcgacctctcccacaaccagctccagaagatctcctgccaccccaccgtctccttccgccacctcgacctctccttcaacgacttcaaggccctccccatctgcaaggagttcggcaacctctcccagctcaacttcctcggcctctccgccatgaagctccagaagctcgacctcctccccatcgcccacctccacctctcctacatcctcctcgacctccgcaactactacatcaaggagaacgagaccgagtccctccagatcctcaacgccaagaccctccacctcgtcttccaccccacctccctcttcgccatccaggtcaacatctccgtcaacaccctcggctgcctccagctcaccaacatcaagctcaacgacgacaactgccaggtcttcatcaagttcctctccgagctcacccgcggccccaccctcctcaacttcaccctcaaccacatcgagaccacctggaagtgcctcgtccgcgtcttccagttcctctggcccaagcccgtcgagtacctcaacatctacaacctcaccatcatcgagtccatccgcgaggaggacttcacctactccaagaccaccctcaaggccctcaccatcgagcacatcaccaaccaggtcttcctcttctcccagaccgccctctacaccatgttctccgagatgaacatcatgatgctcaccatctccgacacccccttcatccacatgctctgcccccacgccccctccaccttcaagttcctcaacttcacccagaacgtcttcaccgactccatcttcgagaagtgctccaccctcgtcaagctcgagaccctcatcctccagaagaacggcctcaaggacctcttcaaggtcggcctcatgaccaaggacatgccctccctcgagatcctcgacgtctcctggaactccctcgagtccggccgccacaaggagaactgcacctgggtcgagtccatcgtcgtcctcaacctctcctccaacatgctcaccgactccgtcttccgctgcctccccccccgcatcaaggtcctcgacctccactccaacaagatcaagtccgtccccaagcaggtcgtcaagctcgaggccctccaggagctcaacgtcgccttcaactccctcaccgacctccccggctgcggctccttctcctccctctccgtcctcatcatcgaccacaactccgtctcccacccctccgccgacttcttccagtcctgccagaagatgcgctccatcaaggccggcgacaaccccttccagtgcacctgcgagctccgcgagttcgtcaagaacatcgaccaggtctcctccgaggtcctcgagggctggcccgactcctacaagtgcgactaccccgagtcctaccgcggctcccccctcaaggacttccacatgtccgagctctcctgcaacatcaccctcctcatcgtcaccatcggcgccaccatgctcgtcctcgccgtcaccgtcacctccctctgcatctacctcgacctcccctggtacctccgcatggtctgccagtggacccagacccgccgccgcgcccgcaacatccccctcgaggagctccagcgcaacctccagttccacgccttcatctcctactccgagcacgactccgcctgggtcaagtccgagctcgtcccctacctcgagaaggaggacatccagatctgcctccacgagcgcaacttcgtccccggcaagtccatcgtcgagaacatcatcaactgcatcgagaagtcctacaagtccatcttcgtcctctcccccaacttcgtccagtccgagtggtgccactacgagctctacttcgcccaccacaacctcttccacgagggctccaacaacctcatcctcatcctcctcgagcccatcccccagaactccatccccaacaagtaccacaagctcaaggccctcatgacccagcgcacctacctccagtggcccaaggagaagtccaagcgcggcctcttctgggccaacatccgcgccgccttcaacatgaagctcaccctcgtcaccgagaacaacgacgtcaagtcctga

SEQ ID NO: 9694 - RNA, 2391 nt, synthetic construct
  misc_feature 1..2391: note = derived and/or modified sequence opt3 fromTLR6__Homo_sapiens__ABW37073
  source 1..2391: mol_type = other RNA
atgaccaaggacaaagagcccatcgtgaagtccttccactttgtctgcctgatgattataatcgttggcacaaggattcagttctccgatgggaacgaatttgccgtggacaaatctaagagaggactcatccatgtacctaaagatcttccactgaagactaaggtgttggacatgtcacaaaattacattgctgagttacaggtcagtgatatgagcttcctgtccgaactaacggtgctccggctgtctcacaaccgcatccagcttctggacttgtcggtttttaaattcaatcaggatctcgagtatctggacctgtcacataaccaactccagaagataagctgtcacccgaccgtgagttttcgacatttagatctgtccttcaatgactttaaagcacttcccatctgcaaggagttcggtaacttgtctcagctgaattttctaggcctcagcgccatgaaactgcagaaacttgatctgttgcctattgcgcacctccacctgtcctacatcttactggacctccgtaactattacattaaggagaatgagacagaatcacttcaaatcctgaacgctaagactttgcatctagtcttccacccaaccagtctgtttgccatacaggtgaatattagcgtaaacacactcgggtgtctgcagcttaccaatatcaagctgaacgatgacaattgccaggttttcattaaattcttgtctgagctcactagaggacccacactgttaaactttaccctgaaccatatcgaaacgacttggaagtgtctagtgagggtcttccaatttctctggcctaaaccagtggagtatctgaatatctacaaccttaccattatagagtccatccgggaagaggacttcacatattcaaagactaccttgaaagcactgacaattgaacacatcaccaatcaggtgtttctcttcagccagacggccctgtacactatgtttagtgagatgaacataatgatgcttacaatttctgatacccccttcatccacatgctgtgccctcatgctccatccacttttaagttcttgaattttacacaaaacgtcttcaccgacagcatctttgaaaagtgttcgacgctcgttaaactggagaccttaattctgcagaagaatggcctaaaagatctcttcaaggtgggtctgatgacaaaagacatgccgtctcttgagatcttggatgtatcctggaactcactggaaagtgggcgccacaaggagaattgcacttgggtggaaagcattgtcgtgctcaacctgtcctctaatatgttaaccgacagcgttttcagatgtctgccccctaggataaaggtgcttgatttgcattcaaacaaaatcaagagtgtcccaaaacaggtggtaaagctcgaggcactgcaggaactaaatgttgcctttaactccctgacagacctccccggatgcggcagcttctcttcactgagtgtgcttattatcgatcacaatagcgtctcccatccttctgctgactttttccaatcgtgtcagaaaatgcggagcatcaaggccggcgataacccatttcagtgcacttgcgagttgcgcgagttcgtgaagaacattgaccaggtctcctcagaagtgctggaggggtggcccgacagttacaaatgtgattatccggaatcttaccgaggaagccctttaaaggactttcacatgtccgagctctcatgcaatataaccctgcttatcgttacaattggtgcgaccatgctggtgttggcagtaactgtcacgagcctctgtatctatctggatctaccctggtacctgagaatggtgtgccaatggacacagaccaggcggcgtgcccgcaacattccactcgaagaactgcagagaaatcttcagttccacgcttttatctcttattccgagcatgacagtgcctgggttaaaagcgaattggtgccttacctggagaaggaagatatacaaatctgtttacacgagaggaacttcgtccccggcaaatctattgtggagaatatcattaactgcatcgaaaagtcctataagtcaatatttgtactcagtccaaatttcgtgcagagcgagtggtgtcattacgaactgtactttgcacaccacaaccttttccatgaggggtcgaataacctgattctaatcctcctggaacccattcctcagaatagcatcccaaacaaatatcacaagttgaaagctctgatgactcagcggacctacttacaatggccgaaggagaaatctaagcgaggactcttctgggccaatatacgcgcggcctttaacatgaaactgacacttgttaccgagaataacgacgtcaagagctga

SEQ ID NO: 9695 - RNA, 2391 nt, synthetic construct
  misc_feature 1..2391: note = derived and/or modified sequence opt4 fromTLR6__Homo_sapiens__ABW37073
  source 1..2391: mol_type = other RNA
atgaccaaggacaaggagcccatcgtgaagagcttccacttcgtgtgcctgatgatcatcatcgtgggcaccagaatccagttcagcgacggcaacgagttcgccgtggacaagagcaagagaggcctgatccacgtgcccaaggacctgcccctgaagaccaaggtgctggacatgagccagaactacatcgccgagctgcaggtgagcgacatgagcttcctgagcgagctgaccgtgctgagactgagccacaacagaatccagctgctggacctgagcgtgttcaagttcaaccaggacctggagtacctggacctgagccacaaccagctgcagaagatcagctgccaccccaccgtgagcttcagacacctggacctgagcttcaacgacttcaaggccctgcccatctgcaaggagttcggcaacctgagccagctgaacttcctgggcctgagcgccatgaagctgcagaagctggacctgctgcccatcgcccacctgcacctgagctacatcctgctggacctgagaaactactacatcaaggagaacgagaccgagagcctgcagatcctgaacgccaagaccctgcacctggtgttccaccccaccagcctgttcgccatccaggtgaacatcagcgtgaacaccctgggctgcctgcagctgaccaacatcaagctgaacgacgacaactgccaggtgttcatcaagttcctgagcgagctgaccagaggccccaccctgctgaacttcaccctgaaccacatcgagaccacctggaagtgcctggtgagagtgttccagttcctgtggcccaagcccgtggagtacctgaacatctacaacctgaccatcatcgagagcatcagagaggaggacttcacctacagcaagaccaccctgaaggccctgaccatcgagcacatcaccaaccaggtgttcctgttcagccagaccgccctgtacaccatgttcagcgagatgaacatcatgatgctgaccatcagcgacacccccttcatccacatgctgtgcccccacgcccccagcaccttcaagttcctgaacttcacccagaacgtgttcaccgacagcatcttcgagaagtgcagcaccctggtgaagctggagaccctgatcctgcagaagaacggcctgaaggacctgttcaaggtgggcctgatgaccaaggacatgcccagcctggagatcctggacgtgagctggaacagcctggagagcggcagacacaaggagaactgcacctgggtggagagcatcgtggtgctgaacctgagcagcaacatgctgaccgacagcgtgttcagatgcctgccccccagaatcaaggtgctggacctgcacagcaacaagatcaagagcgtgcccaagcaggtggtgaagctggaggccctgcaggagctgaacgtggccttcaacagcctgaccgacctgcccggctgcggcagcttcagcagcctgagcgtgctgatcatcgaccacaacagcgtgagccaccccagcgccgacttcttccagagctgccagaagatgagaagcatcaaggccggcgacaaccccttccagtgcacctgcgagctgagagagttcgtgaagaacatcgaccaggtgagcagcgaggtgctggagggctggcccgacagctacaagtgcgactaccccgagagctacagaggcagccccctgaaggacttccacatgagcgagctgagctgcaacatcaccctgctgatcgtgaccatcggcgccaccatgctggtgctggccgtgaccgtgaccagcctgtgcatctacctggacctgccctggtacctgagaatggtgtgccagtggacccagaccagaagaagagccagaaacatccccctggaggagctgcagagaaacctgcagttccacgccttcatcagctacagcgagcacgacagcgcctgggtgaagagcgagctggtgccctacctggagaaggaggacatccagatctgcctgcacgagagaaacttcgtgcccggcaagagcatcgtggagaacatcatcaactgcatcgagaagagctacaagagcatcttcgtgctgagccccaacttcgtgcagagcgagtggtgccactacgagctgtacttcgcccaccacaacctgttccacgagggcagcaacaacctgatcctgatcctgctggagcccatcccccagaacagcatccccaacaagtaccacaagctgaaggccctgatgacccagagaacctacctgcagtggcccaaggagaagagcaagagaggcctgttctgggccaacatcagagccgccttcaacatgaagctgaccctggtgaccgagaacaacgacgtgaagagctga

SEQ ID NO: 9696 - RNA, 2391 nt, synthetic construct
  misc_feature 1..2391: note = derived and/or modified sequence opt5 fromTLR6__Homo_sapiens__ABW37073
  source 1..2391: mol_type = other RNA
atgaccaaggacaaagagcccatcgtgaagtccttccactttgtgtgcctgatgattatcattgttggcacaagaatccagttctccgatgggaacgaatttgccgtggacaaatctaagcggggactcattcatgtgcctaaagatctgccgcttaagacgaaggtcctggacatgagccaaaattacatcgctgagctccaggtgtccgatatgtctttcctgagcgaacttaccgttctgcgcctctcccacaacagaatccagctgctggacctctctgtgtttaaattcaatcaggatctggagtatcttgacctgagccataaccaactccagaagatttcctgtcaccccacagtcagctttcggcatctggatctttctttcaatgactttaaagccctgcctatctgcaaggagttcggcaacctctcccagctgaattttctggggctcagcgcgatgaaactgcagaagctcgatctgctccccattgctcatctgcacctttcttacatcctgctcgacctgcgcaactattacattaaggagaatgagaccgaatccctgcaaatcctcaacgccaaaacactgcaccttgtgttccaccctaccagcctgtttgccattcaggttaatatctctgtgaacacactcggatgtctgcagcttaccaatatcaagctgaacgatgacaattgccaggtcttcattaaattcctctccgagctgacgagaggccccaccctgctcaactttacactgaaccatatcgaaaccacatggaagtgtcttgtgcgggtgttccaatttctgtggcctaaaccggtcgagtatctcaatatttacaacctgaccatcattgagagcatccgcgaagaggacttcacgtattccaagacaaccctgaaagctcttacaatcgaacacattaccaatcaggtttttctcttctctcagaccgccctgtacacaatgtttagcgagatgaacatcatgatgctgacgatttccgatacccccttcatccacatgctctgccctcatgctcccagcacatttaagttcctgaattttacccaaaacgtgttcacagactctatttttgaaaagtgttccacccttgtgaaactggagacgctcatcctgcagaagaatgggctgaaagatcttttcaaggtcggactcatgacaaaagacatgcctagcctggagatcctggatgtgtcttggaacagcctcgaatccggcagacacaaggagaattgcacctgggttgaatctattgtggtcctgaaccttagctccaatatgctgaccgacagcgtgttccggtgtcttcccccgcgcatcaaggttctggatctgcattctaacaaaattaagtccgtgcctaaacaggtcgtgaaacttgaggccctccaggaactgaatgtcgcgtttaacagcctgacagacctccccggctgcgggtctttctccagcctgtccgtgcttatcattgatcacaattctgttagccatccttccgccgactttttccaatcttgtcagaagatgagaagcatcaaggctggagataacccctttcagtgtacctgcgagctgcgggagttcgtgaagaacattgaccaggtctccagcgaagtgctcgagggctggcccgactcttacaaatgcgattatcctgaatcctaccgcgggagcccgctgaaggactttcacatgtctgagctgtcctgcaatatcacacttctcatcgttacgattggagccaccatgctggtgctggctgtcacagtgaccagcctctgtatctatctggatcttccctggtacctgagaatggtgtgccaatggacacagacccggcgcagagcccggaacattcctctcgaagaactgcagagaaatctgcagttccacgcgtttatctcttatagcgagcatgactccgcctgggttaaaagcgaacttgtcccctacctggagaaggaagatattcaaatctgtctccacgagcgcaacttcgtgcctggcaaatctatcgtggagaatattatcaactgcattgaaaagtcctataagagcatctttgtcctgtcccccaatttcgtgcagtctgagtggtgtcattacgaactctactttgctcaccacaacctgttccatgaggggagcaataaccttattctgatcctcctggaaccgatccctcagaatagcattcccaacaaatatcacaagctgaaagcccttatgacgcagcggacctacctgcaatggcctaaggagaaatctaagagaggactcttctgggctaatatccgcgccgcctttaacatgaaactgacactcgttaccgagaataacgacgtcaagagctga

SEQ ID NO: 9697 - protein, 796 aa, synthetic construct [sequence omitted]

SEQ ID NO: 9698 - RNA, 2391 nt, synthetic construct
  misc_feature 1..2391: note = TLR6__Homo_sapiens__ABY67116
  source 1..2391: mol_type = other RNA
atgaccaaagacaaagaacctattgttaaaagcttccattttgtttgccttatgatcataatagttggaaccagaatccagttctccgacggaaatgaatttgcagtagacaagtcaaaaagaggtcttattcatgttccaaaagacctaccgctgaaaaccaaagtcttagatatgtctcagaactacatcgctgagcttcaggtctctgacatgagctttctatcagagttgacagttttgagactttcccataacagaatccagctacttgatttaagtgttttcaagttcaaccaggatttagaatatttggatttatctcataatcagttgcaaaagatatcctgccatcctattgtgagtttcaggcatttagatctctcattcaatgatttcaaggccctgcccatctgtaaggaatttggcaacttatcacaactgaatttcttgggattgagtgctatgaagctgcaaaaattagatttgctgccaattgctcacttgcatctaagttatatccttctggatttaagaaattattatataaaagaaaatgagacagaaagtctacaaattctgaatgcaaaaacccttcaccttgtttttcacccaactagtttattcgctatccaagtgaacatatcagttaatactttagggtgcttacaactgactaatattaaattgaatgatgacaactgtcaagttttcattaaatttttatcagaactcaccagaggtccaaccttactgaattttaccctcaaccacatagaaacgacttggaaatgcctggtcagagtctttcaatttctttggcccaaacctgtggaatatctcaatatttacaatttaacaataattgaaagcattcgtgaagaagattttacttattctaaaacgacattgaaagcattgacaatagaacatatcacgaaccaagtttttctgttttcacagacagctttgtacaccgtgttttctgagatgaacattatgatgttaaccatttcagatacaccttttatacacatgctgtgtcctcatgcaccaagcacattcaagtttttgaactttacgcagaacgttttcacagatagtatttttgaaaaatgttccacgttagttaaattggagacacttatcttacaaaagaatggattaaaagaccttttcaaagtaggtctcatgacgaaggatatgccttctttggaaatactggatgttagctggaattctttggaatctggtagacataaggaaaactgcacttgggttgagagtatagtggtgttaaatttgtcttcaaatatgcttactgactctgttttcagatgtttacctcccaggatcaaggtacttgatcttcacagcaataaaataaagagcattcctaaacaagtcttaaaactggaagctttgcaagaactcaatgttgctttcaattctttaactgaccttcctggatgtggcagctttagcagcctttctgtattgatcattgatcacaattcagtttcccacccatcggctgatttcttccagagctgccagaagatgaggtcaataaaagcaggggacaatccattccaatgtacctgtgagctaagagaatttgtcaaaaatatagaccaagtatcaagtgaagtgttagagggctggcctgattcttataagtgtgactacccagaaagttatagaggaagcccactaaaggactttcacatgtctgaattatcctgcaacataactctgctgatcgtcaccatcggtgccaccatgctggtgttggctgtgactgtgacctccctctgcatctacttggatctgccctggtatctcaggatggtgtgccagtggacccagactcggcgcagggccaggaacatacccttagaagaactccaaagaaacctccagtttcatgcttttatttcatatagtgaacatgattctgcctgggtgaaaagtgaattggtaccttacctagaaaaagaagatatacagatttgtcttcatgagagaaactttgtccctggcaagagcattgtggaaaatatcatcaactgcattgagaagagttacaagtccatctttgttttgtctcccaactttgtccagagtgagtggtgccattacgaactctattttgcccatcacaatctctttcatgaaggatctaataacttaatcctcatcttactggaacccattccacagaacagcattcccaacaagtaccacaagctgaaggctctcatgacgcagcggacttatttgcagtggcccaaggagaaaagcaaacgtgggctcttttgggctaacattagagccgcttttaatatgaaattaacactagtcactgaaaacaatgatgtgaaatcttaa

SEQ ID NO: 9699 - RNA, 2391 nt, synthetic construct
  misc_feature 1..2391: note = derived and/or modified sequence opt1 fromTLR6__Homo_sapiens__ABY67116
  source 1..2391: mol_type = other RNA
atgaccaaggacaaggagcccatcgtcaagagcttccacttcgtgtgcctgatgatcatcatcgtgggcacccgcatccagttcagcgacgggaacgagttcgccgtggacaagagcaagcggggcctcatccacgtcccgaaggacctgcccctgaagacgaaggtgctcgacatgtcccagaactacatcgccgagctccaggtgagcgacatgtccttcctgagcgagctgaccgtcctgcgcctgtcccacaaccggatccagctcctggacctgagcgtgttcaagttcaaccaggacctcgagtacctggacctgtcccacaaccagctccagaagatcagctgccaccccatcgtgtccttccgccacctggacctgagcttcaacgacttcaaggcgctccccatctgcaaggagttcgggaacctgtcccagctgaacttcctcggcctgagcgccatgaagctgcagaagctcgacctgctgccgatcgcccacctccacctgtcctacatcctgctcgacctgcggaactactacatcaaggagaacgagaccgagagcctgcagatcctcaacgccaagaccctgcacctggtcttccaccccacgtccctcttcgccatccaggtgaacatcagcgtgaacaccctggggtgcctgcagctcaccaacatcaagctgaacgacgacaactgccaggtcttcatcaagttcctgtccgagctcacccgcggccccacgctgctgaacttcaccctcaaccacatcgagaccacctggaagtgcctggtgcgggtgttccagttcctgtggcccaagccggtcgagtacctcaacatctacaacctgacgatcatcgagagcatccgcgaggaggacttcacctacagcaagaccaccctgaaggcgctgacgatcgagcacatcaccaaccaggtgttcctcttctcccagaccgccctgtacaccgtgttcagcgagatgaacatcatgatgctgacgatctccgacacccccttcatccacatgctctgcccccacgcccccagcaccttcaagttcctgaacttcacccagaacgtcttcacggactccatcttcgagaagtgcagcaccctggtgaagctcgagaccctgatcctgcagaagaacggcctcaaggacctgttcaaggtggggctgatgaccaaggacatgccgtccctcgagatcctggacgtcagctggaactccctggagagcggccggcacaaggagaactgcacgtgggtggagtccatcgtggtcctcaacctgagctccaacatgctgaccgacagcgtgttccgctgcctcccgccccggatcaaggtcctggacctgcactccaacaagatcaagagcatccccaagcaggtcctcaagctggaggccctgcaggagctcaacgtggcgttcaactccctgaccgacctgcccgggtgcggcagcttctccagcctcagcgtgctgatcatcgaccacaactccgtgagccacccctccgccgacttcttccagagctgccagaagatgcgctccatcaaggccggggacaaccccttccagtgcacgtgcgagctgcgggagttcgtgaagaacatcgaccaggtcagctccgaggtgctcgagggctggcccgacagctacaagtgcgactacccggagtcctaccgcggcagccccctgaaggacttccacatgtccgagctgagctgcaacatcaccctcctgatcgtgaccatcggggccaccatgctggtcctcgccgtgaccgtgacgtccctgtgcatctacctggacctcccctggtacctgcggatggtctgccagtggacccagacccgccggcgcgcgcggaacatccccctggaggagctccagcgcaacctgcagttccacgccttcatcagctactccgagcacgacagcgcctgggtgaagtccgagctggtgccgtacctcgagaaggaggacatccagatctgcctgcacgagcggaacttcgtccccggcaagagcatcgtggagaacatcatcaactgcatcgagaagtcctacaagagcatcttcgtgctgagccccaacttcgtccagtccgagtggtgccactacgagctctacttcgcccaccacaacctgttccacgaggggagcaacaacctgatcctcatcctgctggagcccatcccgcagaactccatccccaacaagtaccacaagctcaaggccctgatgacccagcgcacctacctgcagtggcccaaggagaagtccaagcgcggcctcttctgggcgaacatccgggccgccttcaacatgaagctgacgctggtgaccgagaacaacgacgtgaagtcctga

SEQ ID NO: 9700 - RNA, 2391 nt, synthetic construct
  misc_feature 1..2391: note = derived and/or modified sequence opt2 fromTLR6__Homo_sapiens__ABY67116
  source 1..2391: mol_type = other RNA
atgaccaaggacaaggagcccatcgtcaagtccttccacttcgtctgcctcatgatcatcatcgtcggcacccgcatccagttctccgacggcaacgagttcgccgtcgacaagtccaagcgcggcctcatccacgtccccaaggacctccccctcaagaccaaggtcctcgacatgtcccagaactacatcgccgagctccaggtctccgacatgtccttcctctccgagctcaccgtcctccgcctctcccacaaccgcatccagctcctcgacctctccgtcttcaagttcaaccaggacctcgagtacctcgacctctcccacaaccagctccagaagatctcctgccaccccatcgtctccttccgccacctcgacctctccttcaacgacttcaaggccctccccatctgcaaggagttcggcaacctctcccagctcaacttcctcggcctctccgccatgaagctccagaagctcgacctcctccccatcgcccacctccacctctcctacatcctcctcgacctccgcaactactacatcaaggagaacgagaccgagtccctccagatcctcaacgccaagaccctccacctcgtcttccaccccacctccctcttcgccatccaggtcaacatctccgtcaacaccctcggctgcctccagctcaccaacatcaagctcaacgacgacaactgccaggtcttcatcaagttcctctccgagctcacccgcggccccaccctcctcaacttcaccctcaaccacatcgagaccacctggaagtgcctcgtccgcgtcttccagttcctctggcccaagcccgtcgagtacctcaacatctacaacctcaccatcatcgagtccatccgcgaggaggacttcacctactccaagaccaccctcaaggccctcaccatcgagcacatcaccaaccaggtcttcctcttctcccagaccgccctctacaccgtcttctccgagatgaacatcatgatgctcaccatctccgacacccccttcatccacatgctctgcccccacgccccctccaccttcaagttcctcaacttcacccagaacgtcttcaccgactccatcttcgagaagtgctccaccctcgtcaagctcgagaccctcatcctccagaagaacggcctcaaggacctcttcaaggtcggcctcatgaccaaggacatgccctccctcgagatcctcgacgtctcctggaactccctcgagtccggccgccacaaggagaactgcacctgggtcgagtccatcgtcgtcctcaacctctcctccaacatgctcaccgactccgtcttccgctgcctccccccccgcatcaaggtcctcgacctccactccaacaagatcaagtccatccccaagcaggtcctcaagctcgaggccctccaggagctcaacgtcgccttcaactccctcaccgacctccccggctgcggctccttctcctccctctccgtcctcatcatcgaccacaactccgtctcccacccctccgccgacttcttccagtcctgccagaagatgcgctccatcaaggccggcgacaaccccttccagtgcacctgcgagctccgcgagttcgtcaagaacatcgaccaggtctcctccgaggtcctcgagggctggcccgactcctacaagtgcgactaccccgagtcctaccgcggctcccccctcaaggacttccacatgtccgagctctcctgcaacatcaccctcctcatcgtcaccatcggcgccaccatgctcgtcctcgccgtcaccgtcacctccctctgcatctacctcgacctcccctggtacctccgcatggtctgccagtggacccagacccgccgccgcgcccgcaacatccccctcgaggagctccagcgcaacctccagttccacgccttcatctcctactccgagcacgactccgcctgggtcaagtccgagctcgtcccctacctcgagaaggaggacatccagatctgcctccacgagcgcaacttcgtccccggcaagtccatcgtcgagaacatcatcaactgcatcgagaagtcctacaagtccatcttcgtcctctcccccaacttcgtccagtccgagtggtgccactacgagctctacttcgcccaccacaacctcttccacgagggctccaacaacctcatcctcatcctcctcgagcccatcccccagaactccatccccaacaagtaccacaagctcaaggccctcatgacccagcgcacctacctccagtggcccaaggagaagtccaagcgcggcctcttctgggccaacatccgcgccgccttcaacatgaagctcaccctcgtcaccgagaacaacgacgtcaagtcctga

SEQ ID NO: 9701 - RNA, 2391 nt, synthetic construct
  misc_feature 1..2391: note = derived and/or modified sequence opt3 fromTLR6__Homo_sapiens__ABY67116
  source 1..2391: mol_type = other RNA
atgaccaaggacaaagagcccatcgtcaagagcttccactttgtgtgcctgatgattataatcgttggcacaaggattcagttctccgatgggaacgaatttgccgtggacaaatctaagagaggactcatccatgtacctaaagatcttccactgaagactaaggtgttggacatgtcacaaaattacattgctgagttacaggtcagtgatatgagcttcctgtccgaactaacggtgctccggctgtctcacaaccgcatccagcttctggacttgtcggtttttaaattcaatcaggatctcgagtatctggacctgtcacataaccaactccagaagataagctgtcacccgatcgtgagttttcgacatttagatctgtccttcaatgactttaaagcacttcccatttgcaaggagttcggtaacttgtctcagctgaattttctaggcctcagcgccatgaaactgcagaaacttgatctgttgcctatcgcgcacctccacctgtcctacattttactggacctccgtaactattacatcaaggaaaatgagaccgaatcacttcaaatactgaacgctaaaacattgcatctagtcttccacccaacttccctgtttgccattcaggtgaatatcagcgtaaacaccctcgggtgtctgcagcttacaaatattaagctgaacgatgacaattgccaggttttcatcaaattcttgtctgagctcaccagaggacccactctgttaaactttacactgaaccatatcgaaaccacgtggaagtgtctagtgagggtcttccaatttctctggcctaaaccagtggagtatctgaatatttacaaccttactataatcgagtccattcgggaagaggacttcacctattcaaagacaactttgaaagcactgaccatcgaacacataacaaatcaggtgtttctcttcagccagaccgccctgtacacggtctttagtgagatgaacattatgatgcttactatctctgatacacccttcatccacatgctgtgccctcatgctccatccacctttaagttcttgaattttactcaaaacgttttcacagacagcatttttgaaaagtgttcgaccctcgtgaaactggagacgttaatcctgcagaagaatggcctaaaagatctcttcaaggtaggtctgatgaccaaagacatgccgtctcttgagattttggatgtgtcctggaactcactggaaagtgggcgccacaaggagaattgcacatgggtcgaaagcatagtggttctcaacctgtcctctaatatgttaactgacagcgtgttcagatgtctgccccctaggatcaaggtccttgatttgcattcaaacaaaattaagagtatcccaaaacaggtgctcaagctggaggcactacaggaactgaatgtagcctttaactccctcaccgacctgcccggatgcggcagcttctcttcacttagtgttttgatcattgatcacaatagcgtgtcccatccttctgctgactttttccaatcgtgtcagaaaatgcggagcataaaggccggcgataacccatttcagtgcacatgcgagctgcgcgagttcgtcaagaacatcgaccaggtgtcctcagaagtcttagaggggtggcccgacagttacaaatgtgattatccggaatcttaccgaggaagccctctcaaggactttcacatgtccgagctgtcatgcaatattactcttctgatcgtgaccattggtgcgacaatgttggttctcgcagtgaccgtaactagcctgtgtatctatctagatctgccctggtacctcagaatggtctgccaatggacgcagacaaggcggcgtgcccgcaacataccactggaggaacttcagagaaatttgcagttccacgcttttatctcttattccgagcatgacagtgcctgggtgaaaagcgaactggttccttacttagagaaggaagatattcaaatctgtctccacgagaggaacttcgtgcccggcaaatctattgtcgagaatatcataaactgcattgaaaagtcctataagtcaatctttgtgctgagtccaaatttcgtacagagcgagtggtgtcattacgaactttactttgcacaccacaacctgttccatgaggggtcgaataacctaattctcatcctgttggaacccatacctcagaatagtatcccaaacaaatatcacaagctgaaggctttaatgacccagcggacttacctccaatggccgaaggagaaatctaagcgaggactgttctgggccaatattcgcgcggcctttaacatgaaacttaccctggtgacagagaataacgacgttaagagctga

SEQ ID NO: 9702 - RNA, 2391 nt, synthetic construct
  misc_feature 1..2391: note = derived and/or modified sequence opt4 fromTLR6__Homo_sapiens__ABY67116
  source 1..2391: mol_type = other RNA
atgaccaaggacaaggagcccatcgtgaagagcttccacttcgtgtgcctgatgatcatcatcgtgggcaccagaatccagttcagcgacggcaacgagttcgccgtggacaagagcaagagaggcctgatccacgtgcccaaggacctgcccctgaagaccaaggtgctggacatgagccagaactacatcgccgagctgcaggtgagcgacatgagcttcctgagcgagctgaccgtgctgagactgagccacaacagaatccagctgctggacctgagcgtgttcaagttcaaccaggacctggagtacctggacctgagccacaaccagctgcagaagatcagctgccaccccatcgtgagcttcagacacctggacctgagcttcaacgacttcaaggccctgcccatctgcaaggagttcggcaacctgagccagctgaacttcctgggcctgagcgccatgaagctgcagaagctggacctgctgcccatcgcccacctgcacctgagctacatcctgctggacctgagaaactactacatcaaggagaacgagaccgagagcctgcagatcctgaacgccaagaccctgcacctggtgttccaccccaccagcctgttcgccatccaggtgaacatcagcgtgaacaccctgggctgcctgcagctgaccaacatcaagctgaacgacgacaactgccaggtgttcatcaagttcctgagcgagctgaccagaggccccaccctgctgaacttcaccctgaaccacatcgagaccacctggaagtgcctggtgagagtgttccagttcctgtggcccaagcccgtggagtacctgaacatctacaacctgaccatcatcgagagcatcagagaggaggacttcacctacagcaagaccaccctgaaggccctgaccatcgagcacatcaccaaccaggtgttcctgttcagccagaccgccctgtacaccgtgttcagcgagatgaacatcatgatgctgaccatcagcgacacccccttcatccacatgctgtgcccccacgcccccagcaccttcaagttcctgaacttcacccagaacgtgttcaccgacagcatcttcgagaagtgcagcaccctggtgaagctggagaccctgatcctgcagaagaacggcctgaaggacctgttcaaggtgggcctgatgaccaaggacatgcccagcctggagatcctggacgtgagctggaacagcctggagagcggcagacacaaggagaactgcacctgggtggagagcatcgtggtgctgaacctgagcagcaacatgctgaccgacagcgtgttcagatgcctgccccccagaatcaaggtgctggacctgcacagcaacaagatcaagagcatccccaagcaggtgctgaagctggaggccctgcaggagctgaacgtggccttcaacagcctgaccgacctgcccggctgcggcagcttcagcagcctgagcgtgctgatcatcgaccacaacagcgtgagccaccccagcgccgacttcttccagagctgccagaagatgagaagcatcaaggccggcgacaaccccttccagtgcacctgcgagctgagagagttcgtgaagaacatcgaccaggtgagcagcgaggtgctggagggctggcccgacagctacaagtgcgactaccccgagagctacagaggcagccccctgaaggacttccacatgagcgagctgagctgcaacatcaccctgctgatcgtgaccatcggcgccaccatgctggtgctggccgtgaccgtgaccagcctgtgcatctacctggacctgccctggtacctgagaatggtgtgccagtggacccagaccagaagaagagccagaaacatccccctggaggagctgcagagaaacctgcagttccacgccttcatcagctacagcgagcacgacagcgcctgggtgaagagcgagctggtgccctacctggagaaggaggacatccagatctgcctgcacgagagaaacttcgtgcccggcaagagcatcgtggagaacatcatcaactgcatcgagaagagctacaagagcatcttcgtgctgagccccaacttcgtgcagagcgagtggtgccactacgagctgtacttcgcccaccacaacctgttccacgagggcagcaacaacctgatcctgatcctgctggagcccatcccccagaacagcatccccaacaagtaccacaagctgaaggccctgatgacccagagaacctacctgcagtggcccaaggagaagagcaagagaggcctgttctgggccaacatcagagccgccttcaacatgaagctgaccctggtgaccgagaacaacgacgtgaagagctga

SEQ ID NO: 9703 - RNA, 2391 nt, synthetic construct
  misc_feature 1..2391: note = derived and/or modified sequence opt5 fromTLR6__Homo_sapiens__ABY67116
  source 1..2391: mol_type = other RNA
atgaccaaggacaaagagcccatcgtgaagtccttccactttgtctgcctgatgattatcattgttggcacaagaatccagttctccgatgggaacgaatttgccgtggacaaatctaagcggggactcattcatgtgcctaaagatctgccgcttaagacgaaggtcctggacatgagccaaaattacatcgctgagctccaggtgtccgatatgtctttcctgagcgaacttaccgttctgcgcctctcccacaacagaatccagctgctggacctctctgtgtttaaattcaatcaggatctggagtatcttgacctgagccataaccaactccagaagatttcctgtcaccccatcgtcagctttcggcatctggatctttctttcaatgactttaaagccctgcctatttgcaaggagttcggcaacctctcccagctgaattttctggggctcagcgcgatgaaactgcagaagctcgatctgctccccatcgctcatctgcacctttcttacattctgctcgacctgcgcaactattacatcaaggagaatgagacagaatccctgcaaattctcaacgccaaaaccctgcaccttgtgttccaccctacaagcctgtttgccatccaggttaatatctctgtgaacaccctcggatgtctgcagcttacaaatattaagctgaacgatgacaattgccaggtcttcatcaaattcctctccgagctgaccagaggccccacgctgctcaactttaccctgaaccatattgaaacaacctggaagtgtcttgtgcgggtgttccaatttctgtggcctaaaccggtcgagtatctcaatatctacaacctgacaattatcgagagcatccgcgaagaggacttcacctattccaagacgacactgaaagctcttaccattgaacacatcacaaatcaggtttttctcttctctcagaccgccctgtacaccgtgtttagcgagatgaacattatgatgctgacaatctccgatacgcccttcattcacatgctctgccctcatgctcccagcacctttaagttcctgaattttacacaaaacgtgttcaccgactctatctttgaaaagtgttccacacttgtcaaactggagaccctcatcctgcagaagaatgggctgaaagatcttttcaaggtgggactcatgacgaaagacatgcctagcctggagattctggatgtttcttggaacagcctcgaatccggcagacacaaggagaattgcacatgggtggaatctatcgtcgtgctgaaccttagctccaatatgctgaccgacagcgttttccggtgtcttcccccgcgcattaaggtgctggatctgcattctaacaaaatcaagtccattcctaaacaggtccttaagctcgaggccctgcaggaactgaatgtggcgtttaacagcctcaccgacctgcccggctgcgggtctttctccagcctttccgtcctgatcattgatcacaattctgtgagccatccttccgccgactttttccaatcttgtcagaaaatgagaagcatcaaggctggagataacccctttcagtgcacatgcgagctccgggagttcgttaagaacatcgaccaggtgtccagcgaagtcctggagggctggcccgactcttacaaatgtgattatcctgaatcctaccgcgggagcccgctgaaggactttcacatgtctgagctttcctgcaatattaccctcctgatcgtgacaattggagccacgatgctggttctcgctgtgaccgtcacaagcctgtgtatctatcttgatctgccctggtacctcagaatggtgtgccaatggacccagacacggcgcagagcccggaacattcctctggaagaactgcagagaaatcttcagttccacgcgtttatctcttatagcgagcatgactccgcctgggtgaaaagcgaactggttccctacctcgagaaggaagatatccaaatttgtctgcacgagcgcaacttcgtccctggcaaatctatcgtggagaatattatcaactgcattgaaaagtcctataagagcatctttgtgctctcccccaatttcgtccagtctgagtggtgtcattacgaactgtactttgctcaccacaaccttttccatgaggggagcaataacctgatcctcattctgctggaaccgatccctcagaatagcattcccaacaaatatcacaaacttaaggccctgatgacccagcggacgtacctccaatggcctaaggagaaatctaagagaggactgttctgggctaatatccgcgccgcctttaacatgaaactcaccctggtgacagagaataacgacgttaagagctga

SEQ ID NO: 9704 - protein, 796 aa, synthetic construct [sequence omitted]

SEQ ID NO: 9705 - RNA, 2391 nt, synthetic construct
  misc_feature 1..2391: note = TLR6__Homo_sapiens__AAY88753
  source 1..2391: mol_type = other RNA
atgaccaaagacaaagaacctattgttaaaagcttccattttgtttgccttatgatcataatagttggaaccagaatccagttctccgacggaaatgaatttgcagtagacaagtcaaaaagaggtcttattcatgttccaaaagacctaccgctgaaaaccaaagtcttagatatgtctcagaactacatcgctgagcttcaggtctctgacatgagctttctatcagagttgacagttttgagactttcccataacagaatccagctacttgatttaagtgttttcaagttcaaccaggatttagaatatttggatttatctcataatcagttgcaaaagatatcctgccatcctattgtgagtttcaggcatttagatctctcattcaatgatttcaaggccctgcccatctgtaaggaatttggcaacttatcacaactgaatttcttgggattgagtgctatgaagctgcaaaaattagatttgctgccaattgctcacttgcatctaagttatatccttctggatttaagaaattattatataaaagaaaatgagacagaaagtctacaaattctgaatgcaaaaacccttcaccttgtttttcacccaactagtttattcgctatccaagtgaacatatcagttaatactttagggtgcttacaactgactaatattaaattgaatgatgacaactgtcaagttttcattaaatttttatcagaactcaccagaggtccaaccttactgaattttaccctcaaccacatagaaacgacttggaaatgcctggtcagagtctttcaatttctttggcccaaacctgtggaatatctcaatatttacaatttaacaataattgaaagcattcgtgaagaagattttacttattctaaaacgacattgaaagcattgacaatagaacatatcacgaaccaagtttttctgttttcacagacagctttgtacaccgtgttttctgagatgaacattatgatgttaaccatttcagatacaccttttatacacatgctgtgtcctcatgcaccaagcacattcaagtttttgaactttacccagaacgttttcacagatagtatttttgaaaaatgttccacgttagttaaattggagacacttatcttacaaaagaatggattaaaagaccttttcaaagtaggtctcatgacgaaggatatgccttctttggaaatactggatgttagctggaattctttggaatctggtagacataaagaaaactgcacttgggctgagagtatagtggtgttaaatttgtcttcaaatatgcttactgactctgttttcagatgtttacctcccaggatcaaggtacttgatcttcacagcaataaaataaagagcattcctaaacaagtcgtaaaactggaagctttgcaagaactcaatgttgctttcaattctttaactgaccttcctggatgtggcagctttagcagcctttctgtattgatcattgatcacaattcagtttcccacccatcggctgatttcttccagagctgccagaagatgaggtcaataaaagcaggggacaatccattccaatgtacctgtgagctaagagaatttgtcaaaaatatagaccaagtatcaagtgaagtgttagagggctggcctgattcttataagtgtgactacccagaaagttatagaggaagcccactaaaggactttcacatgtctgaattatcctgcaacataactctgctgatcgtcaccatcggtgccaccatgctggtgttggctgtgactgtgacctccctctgcatctacttggatctgccctggtatctcaggatggtgtgccagtggacccagactcggcgcagggccaggaacatacccttagaagaactccaaagaaacctccagtttcatgcttttatttcatatagtgaacatgattctgcctgggtgaaaagtgaattggtaccttacctagaaaaagaagatatacagatttgtcttcatgagagaaactttgtccctggcaagagcattgtggaaaatatcatcaactgcattgagaagagttacaagtccatctttgttttgtctcccaactttgtccagagtgagtggtgccattacgaactctattttgcccatcacaatctctttcatgaaggatctaataacttaatcctcatcttactggaacccattccacagaacagcattcccaacaagtaccacaagctgaaggctctcatgatgcagcggacttatttgcagtggcccaaggagaaaagcaaacgtgggctcttttgggctaacattagagccgcttttaatatgaaattaacactagtcactgaaaacaatgatgtgaaatcttaa

SEQ ID NO: 9706 - RNA, 2391 nt, synthetic construct
  misc_feature 1..2391: note = derived and/or modified sequence opt1 fromTLR6__Homo_sapiens__AAY88753
  source 1..2391: mol_type = other RNA
atgaccaaggacaaggagcccatcgtcaagagcttccacttcgtgtgcctgatgatcatcatcgtgggcacccgcatccagttcagcgacgggaacgagttcgccgtggacaagagcaagcggggcctcatccacgtcccgaaggacctgcccctgaagacgaaggtgctcgacatgtcccagaactacatcgccgagctccaggtgagcgacatgtccttcctgagcgagctgaccgtcctgcgcctgtcccacaaccggatccagctcctggacctgagcgtgttcaagttcaaccaggacctcgagtacctggacctgtcccacaaccagctccagaagatcagctgccaccccatcgtgtccttccgccacctggacctgagcttcaacgacttcaaggcgctccccatctgcaaggagttcgggaacctgtcccagctgaacttcctcggcctgagcgccatgaagctgcagaagctcgacctgctgccgatcgcccacctccacctgtcctacatcctgctcgacctgcggaactactacatcaaggagaacgagaccgagagcctgcagatcctcaacgccaagaccctgcacctggtcttccaccccacgtccctcttcgccatccaggtgaacatcagcgtgaacaccctggggtgcctgcagctcaccaacatcaagctgaacgacgacaactgccaggtcttcatcaagttcctgtccgagctcacccgcggccccacgctgctgaacttcaccctcaaccacatcgagaccacctggaagtgcctggtgcgggtgttccagttcctgtggcccaagccggtcgagtacctcaacatctacaacctgacgatcatcgagagcatccgcgaggaggacttcacctacagcaagaccaccctgaaggcgctgacgatcgagcacatcaccaaccaggtgttcctcttctcccagaccgccctgtacaccgtgttcagcgagatgaacatcatgatgctgacgatctccgacacccccttcatccacatgctctgcccccacgcccccagcaccttcaagttcctgaacttcacccagaacgtcttcacggactccatcttcgagaagtgcagcaccctggtgaagctcgagaccctgatcctgcagaagaacggcctcaaggacctgttcaaggtggggctgatgaccaaggacatgccgtccctcgagatcctggacgtcagctggaactccctggagagcggccggcacaaggagaactgcacgtgggccgagtccatcgtggtgctcaacctgagctccaacatgctgaccgacagcgtcttccgctgcctcccgccccggatcaaggtgctggacctgcactccaacaagatcaagagcatccccaagcaggtcgtgaagctcgaggcgctgcaggagctgaacgtggccttcaactccctcaccgacctgcccgggtgcggcagcttctccagcctgagcgtcctcatcatcgaccacaactccgtgagccacccctccgccgacttcttccagagctgccagaagatgcgctccatcaaggccggggacaaccccttccagtgcacgtgcgagctgcgggagttcgtgaagaacatcgaccaggtcagctccgaggtgctggagggctggcccgacagctacaagtgcgactacccggagtcctaccgcggcagccccctcaaggacttccacatgtccgagctgagctgcaacatcaccctgctcatcgtgaccatcggggccaccatgctggtcctggcggtgaccgtgacgtccctctgcatctacctggacctgccctggtacctccggatggtctgccagtggacccagacccgccggcgcgcccggaacatccccctggaggagctgcagcgcaacctccagttccacgccttcatcagctactccgagcacgacagcgcctgggtgaagtccgagctggtgccgtacctggagaaggaggacatccagatctgcctccacgagcggaacttcgtccccggcaagagcatcgtggagaacatcatcaactgcatcgagaagtcctacaagagcatcttcgtgctgagccccaacttcgtccagtccgagtggtgccactacgagctgtacttcgcccaccacaacctcttccacgaggggagcaacaacctgatcctgatcctcctggagcccatcccgcagaactccatccccaacaagtaccacaagctgaaggcgctcatgatgcagcgcacctacctgcagtggcccaaggagaagtccaagcgcggcctgttctgggccaacatccgggccgccttcaacatgaagctcaccctggtgacggagaacaacgacgtgaagtcctga

SEQ ID NO: 9707 - RNA, 2391 nt, synthetic construct
  misc_feature 1..2391: note = derived and/or modified sequence opt2 fromTLR6__Homo_sapiens__AAY88753
  source 1..2391: mol_type = other RNA
atgaccaaggacaaggagcccatcgtcaagtccttccacttcgtctgcctcatgatcatcatcgtcggcacccgcatccagttctccgacggcaacgagttcgccgtcgacaagtccaagcgcggcctcatccacgtccccaaggacctccccctcaagaccaaggtcctcgacatgtcccagaactacatcgccgagctccaggtctccgacatgtccttcctctccgagctcaccgtcctccgcctctcccacaaccgcatccagctcctcgacctctccgtcttcaagttcaaccaggacctcgagtacctcgacctctcccacaaccagctccagaagatctcctgccaccccatcgtctccttccgccacctcgacctctccttcaacgacttcaaggccctccccatctgcaaggagttcggcaacctctcccagctcaacttcctcggcctctccgccatgaagctccagaagctcgacctcctccccatcgcccacctccacctctcctacatcctcctcgacctccgcaactactacatcaaggagaacgagaccgagtccctccagatcctcaacgccaagaccctccacctcgtcttccaccccacctccctcttcgccatccaggtcaacatctccgtcaacaccctcggctgcctccagctcaccaacatcaagctcaacgacgacaactgccaggtcttcatcaagttcctctccgagctcacccgcggccccaccctcctcaacttcaccctcaaccacatcgagaccacctggaagtgcctcgtccgcgtcttccagttcctctggcccaagcccgtcgagtacctcaacatctacaacctcaccatcatcgagtccatccgcgaggaggacttcacctactccaagaccaccctcaaggccctcaccatcgagcacatcaccaaccaggtcttcctcttctcccagaccgccctctacaccgtcttctccgagatgaacatcatgatgctcaccatctccgacacccccttcatccacatgctctgcccccacgccccctccaccttcaagttcctcaacttcacccagaacgtcttcaccgactccatcttcgagaagtgctccaccctcgtcaagctcgagaccctcatcctccagaagaacggcctcaaggacctcttcaaggtcggcctcatgaccaaggacatgccctccctcgagatcctcgacgtctcctggaactccctcgagtccggccgccacaaggagaactgcacctgggccgagtccatcgtcgtcctcaacctctcctccaacatgctcaccgactccgtcttccgctgcctccccccccgcatcaaggtcctcgacctccactccaacaagatcaagtccatccccaagcaggtcgtcaagctcgaggccctccaggagctcaacgtcgccttcaactccctcaccgacctccccggctgcggctccttctcctccctctccgtcctcatcatcgaccacaactccgtctcccacccctccgccgacttcttccagtcctgccagaagatgcgctccatcaaggccggcgacaaccccttccagtgcacctgcgagctccgcgagttcgtcaagaacatcgaccaggtctcctccgaggtcctcgagggctggcccgactcctacaagtgcgactaccccgagtcctaccgcggctcccccctcaaggacttccacatgtccgagctctcctgcaacatcaccctcctcatcgtcaccatcggcgccaccatgctcgtcctcgccgtcaccgtcacctccctctgcatctacctcgacctcccctggtacctccgcatggtctgccagtggacccagacccgccgccgcgcccgcaacatccccctcgaggagctccagcgcaacctccagttccacgccttcatctcctactccgagcacgactccgcctgggtcaagtccgagctcgtcccctacctcgagaaggaggacatccagatctgcctccacgagcgcaacttcgtccccggcaagtccatcgtcgagaacatcatcaactgcatcgagaagtcctacaagtccatcttcgtcctctcccccaacttcgtccagtccgagtggtgccactacgagctctacttcgcccaccacaacctcttccacgagggctccaacaacctcatcctcatcctcctcgagcccatcccccagaactccatccccaacaagtaccacaagctcaaggccctcatgatgcagcgcacctacctccagtggcccaaggagaagtccaagcgcggcctcttctgggccaacatccgcgccgccttcaacatgaagctcaccctcgtcaccgagaacaacgacgtcaagtcctga

SEQ ID NO: 9708 - RNA, 2391 nt, synthetic construct
  misc_feature 1..2391: note = derived and/or modified sequence opt3 fromTLR6__Homo_sapiens__AAY88753
  source 1..2391: mol_type = other RNA
atgaccaaggacaaagagcccatcgtcaagagcttccactttgtgtgcctgatgattataatcgttggcacaaggattcagttctccgatgggaacgaatttgccgtggacaaatctaagagaggactcatccatgtacctaaagatcttccactgaagactaaggtgttggacatgtcacaaaattacattgctgagttacaggtcagtgatatgagcttcctgtccgaactaacggtgctccggctgtctcacaaccgcatccagcttctggacttgtcggtttttaaattcaatcaggatctcgagtatctggacctgtcacataaccaactccagaagataagctgtcacccgatcgtgagttttcgacatttagatctgtccttcaatgactttaaagcacttcccatttgcaaggagttcggtaacttgtctcagctgaattttctaggcctcagcgccatgaaactgcagaaacttgatctgttgcctatcgcgcacctccacctgtcctacattttactggacctccgtaactattacatcaaggagaatgagaccgaatcacttcaaatactgaacgctaagacattgcatctagtcttccacccaacttccctgtttgccattcaggtgaatatcagcgtaaacaccctcgggtgtctgcagcttacaaatattaagctgaacgatgacaattgccaggttttcatcaaattcttgtctgagctcaccagaggacccactctgttaaactttacactgaaccatatcgaaaccacgtggaagtgtctagtgagggtcttccaatttctctggcctaaaccagtggagtatctgaatatttacaaccttactataatcgagtccattcgggaagaggacttcacctattcaaagacaactttgaaagcactgaccatcgaacacataacaaatcaggtgtttctcttcagccagaccgccctgtacacggtctttagtgagatgaacattatgatgcttactatctctgatacacccttcatccacatgctgtgccctcatgctccatccacctttaagttcttgaattttactcaaaacgttttcacagacagcatttttgaaaagtgttcgaccctcgtgaaactggagacgttaatcctgcagaagaatggcctaaaagatctcttcaaggtaggtctgatgaccaaagacatgccgtctcttgagattttggatgtgtcctggaactcactggaaagtgggcgccacaaggagaattgcacatgggcagaaagcatagtcgtgctcaacctgtcctctaatatgttaactgacagcgttttcagatgtctgccccctaggatcaaggtgcttgatttgcattcaaacaaaattaagagtatcccaaaacaggtcgtgaagctcgaggccctgcaggaactaaatgtagcttttaactccctgaccgacctccccggatgcggcagcttctcttcactgagtgttcttatcattgatcacaatagcgtgtcccatccttctgccgactttttccaatcgtgtcagaaaatgcggagcataaaggcgggcgataacccatttcagtgcacatgcgagttgcgcgagttcgtcaagaacatcgaccaggtgtcctcagaagtcctggaggggtggcccgacagttacaaatgtgattatccggaatcttaccgaggaagccctttaaaggactttcacatgtccgagctctcatgcaatattactctgcttatcgtgaccattggtgcaacaatgctggttttggccgtgaccgtaactagcctctgtatctatctggatctaccctggtacctgagaatggtctgccaatggacgcagacaaggcggcgtgctcgcaacataccactcgaagaactgcagagaaatcttcagttccacgcctttatctcttattccgagcatgacagtgcatgggtgaaaagcgaattggttccttacctggagaaggaagatattcaaatctgtttacacgagaggaacttcgtgcccggcaaatctattgtcgagaatatcataaactgcattgaaaagtcctataagtcaatctttgtgctcagtccaaatttcgtacagagcgagtggtgtcattacgaactgtactttgctcaccacaaccttttccatgaggggtcgaataacctgattctaatcctcctggaacccatacctcagaatagtatcccaaacaaatatcacaagttgaaagccctgatgatgcagcggacctacttacaatggccgaaggagaaatctaagcgaggactcttctgggcgaatattcgcgccgcatttaacatgaaactgactcttgtgaccgagaataacgacgttaagagctga

SEQ ID NO: 9709 - RNA, 2391 nt, synthetic construct
  misc_feature 1..2391: note = derived and/or modified sequence opt4 fromTLR6__Homo_sapiens__AAY88753
  source 1..2391: mol_type = other RNA
atgaccaaggacaaggagcccatcgtgaagagcttccacttcgtgtgcctgatgatcatcatcgtgggcaccagaatccagttcagcgacggcaacgagttcgccgtggacaagagcaagagaggcctgatccacgtgcccaaggacctgcccctgaagaccaaggtgctggacatgagccagaactacatcgccgagctgcaggtgagcgacatgagcttcctgagcgagctgaccgtgctgagactgagccacaacagaatccagctgctggacctgagcgtgttcaagttcaaccaggacctggagtacctggacctgagccacaaccagctgcagaagatcagctgccaccccatcgtgagcttcagacacctggacctgagcttcaacgacttcaaggccctgcccatctgcaaggagttcggcaacctgagccagctgaacttcctgggcctgagcgccatgaagctgcagaagctggacctgctgcccatcgcccacctgcacctgagctacatcctgctggacctgagaaactactacatcaaggagaacgagaccgagagcctgcagatcctgaacgccaagaccctgcacctggtgttccaccccaccagcctgttcgccatccaggtgaacatcagcgtgaacaccctgggctgcctgcagctgaccaacatcaagctgaacgacgacaactgccaggtgttcatcaagttcctgagcgagctgaccagaggccccaccctgctgaacttcaccctgaaccacatcgagaccacctggaagtgcctggtgagagtgttccagttcctgtggcccaagcccgtggagtacctgaacatctacaacctgaccatcatcgagagcatcagagaggaggacttcacctacagcaagaccaccctgaaggccctgaccatcgagcacatcaccaaccaggtgttcctgttcagccagaccgccctgtacaccgtgttcagcgagatgaacatcatgatgctgaccatcagcgacacccccttcatccacatgctgtgcccccacgcccccagcaccttcaagttcctgaacttcacccagaacgtgttcaccgacagcatcttcgagaagtgcagcaccctggtgaagctggagaccctgatcctgcagaagaacggcctgaaggacctgttcaaggtgggcctgatgaccaaggacatgcccagcctggagatcctggacgtgagctggaacagcctggagagcggcagacacaaggagaactgcacctgggccgagagcatcgtggtgctgaacctgagcagcaacatgctgaccgacagcgtgttcagatgcctgccccccagaatcaaggtgctggacctgcacagcaacaagatcaagagcatccccaagcaggtggtgaagctggaggccctgcaggagctgaacgtggccttcaacagcctgaccgacctgcccggctgcggcagcttcagcagcctgagcgtgctgatcatcgaccacaacagcgtgagccaccccagcgccgacttcttccagagctgccagaagatgagaagcatcaaggccggcgacaaccccttccagtgcacctgcgagctgagagagttcgtgaagaacatcgaccaggtgagcagcgaggtgctggagggctggcccgacagctacaagtgcgactaccccgagagctacagaggcagccccctgaaggacttccacatgagcgagctgagctgcaacatcaccctgctgatcgtgaccatcggcgccaccatgctggtgctggccgtgaccgtgaccagcctgtgcatctacctggacctgccctggtacctgagaatggtgtgccagtggacccagaccagaagaagagccagaaacatccccctggaggagctgcagagaaacctgcagttccacgccttcatcagctacagcgagcacgacagcgcctgggtgaagagcgagctggtgccctacctggagaaggaggacatccagatctgcctgcacgagagaaacttcgtgcccggcaagagcatcgtggagaacatcatcaactgcatcgagaagagctacaagagcatcttcgtgctgagccccaacttcgtgcagagcgagtggtgccactacgagctgtacttcgcccaccacaacctgttccacgagggcagcaacaacctgatcctgatcctgctggagcccatcccccagaacagcatccccaacaagtaccacaagctgaaggccctgatgatgcagagaacctacctgcagtggcccaaggagaagagcaagagaggcctgttctgggccaacatcagagccgccttcaacatgaagctgaccctggtgaccgagaacaacgacgtgaagagctga

SEQ ID NO: 9710 - RNA, 2391 nt, synthetic construct
  misc_feature 1..2391: note = derived and/or modified sequence opt5 fromTLR6__Homo_sapiens__AAY88753
  source 1..2391: mol_type = other RNA
atgaccaaggacaaagagcccatcgtgaagtccttccactttgtctgcctgatgattatcattgttggcacaagaatccagttctccgatgggaacgaatttgccgtggacaaatctaagcggggactcattcatgtgcctaaagatctgccgcttaagacgaaggtcctggacatgagccaaaattacatcgctgagctccaggtgtccgatatgtctttcctgagcgaacttaccgttctgcgcctctcccacaacagaatccagctgctggacctctctgtgtttaaattcaatcaggatctggagtatcttgacctgagccataaccaactccagaagatttcctgtcaccccatcgtcagctttcggcatctggatctttctttcaatgactttaaagccctgcctatttgcaaggagttcggcaacctctcccagctgaattttctggggctcagcgcgatgaaactgcagaagctcgatctgctccccatcgctcatctgcacctttcttacattctgctcgacctgcgcaactattacatcaaggagaatgagacagaatccctgcaaattctcaacgccaaaaccctgcaccttgtgttccaccctacaagcctgtttgccatccaggttaatatctctgtgaacaccctcggatgtctgcagcttacaaatattaagctgaacgatgacaattgccaggtcttcatcaaattcctctccgagctgaccagaggccccacgctgctcaactttaccctgaaccatattgaaacaacctggaagtgtcttgtgcgggtgttccaatttctgtggcctaaaccggtcgagtatctcaatatctacaacctgacaattatcgagagcatccgcgaagaggacttcacctattccaagacgacactgaaagctcttaccattgaacacatcacaaatcaggtttttctcttctctcagaccgccctgtacaccgtgtttagcgagatgaacattatgatgctgacaatctccgatacgcccttcattcacatgctctgccctcatgctcccagcacctttaagttcctgaattttacacaaaacgtgttcaccgactctatctttgaaaagtgttccacacttgtcaaactggagaccctcatcctgcagaagaatgggctgaaagatcttttcaaggtgggactcatgacgaaagacatgcctagcctggagattctggatgtttcttggaacagcctcgaatccggcagacacaaggagaattgcacatgggccgaatctatcgtggtcctgaaccttagctccaatatgctgaccgacagcgtgttccggtgtcttcccccgcgcattaaggttctggatctgcattctaacaaaatcaagtccattcctaaacaggtggtcaaacttgaggcgctccaggaactgaatgtggcctttaacagcctgaccgacctccccggctgcgggtctttctccagcctgtccgtccttatcattgatcacaattctgtgagccatccttccgctgactttttccaatcttgtcagaagatgagaagcatcaaggccggagataacccctttcagtgcacatgcgagctgcgggagttcgttaagaacatcgaccaggtgtccagcgaagtcctcgagggctggcccgactcttacaaatgtgattatcctgaatcctaccgcgggagcccgctgaaggactttcacatgtctgagctgtcctgcaatattacccttctcatcgtgacaattggagctacgatgctggttctggccgtgaccgtcacaagcctctgtatctatctggatcttccctggtacctgagaatggtgtgccaatggacccagacacggcgcagagcgcggaacattcctctcgaagaactgcagagaaatctgcagttccacgcctttatctcttatagcgagcatgactccgcttgggtgaaaagcgaacttgttccctacctggagaaggaagatatccaaatttgtctccacgagcgcaacttcgtccctggcaaatctatcgtggagaatattatcaactgcattgaaaagtcctataagagcatctttgtgctgtcccccaatttcgtccagtctgagtggtgtcattacgaactctactttgcccaccacaacctgttccatgaggggagcaataaccttatcctgattctcctggaaccgatccctcagaatagcattcccaacaaatatcacaagctgaaagctcttatgatgcagcggacctacctgcaatggcctaaggagaaatctaagagaggactcttctgggccaatatccgcgccgcttttaacatgaaactgacgctcgtgaccgagaataacgacgttaagagctga

SEQ ID NO: 9711 - protein, 796 aa, synthetic construct [sequence omitted]

SEQ ID NO: 9712 - RNA, 2391 nt, synthetic construct
  misc_feature 1..2391: note = TLR6__Homo_sapiens__AAY88754
  source 1..2391: mol_type = other RNA
atgaccaaagacaaagaacctattgttaaaagcttccattttgtttgccttatgatcataatagttggaaccagaatccagttctccgacggaaatgaatttgcagtagacaagtcaaaaagaggtcttattcatgttccaaaagacctaccgctgaaaaccaaagtcttagatatgtctcagaactacatcgctgagcttcaggtctctgacatgagctttctatcagagttgacagttttgagactttcccataacagaatccagctacttgatttaagtgttttcaagttcaaccaggatttagaatatttggatttatctcataatcagttgcaaaagatatcctgccatcctattgtgagtttcaggcatttagatctctcattcaatgatttcaaggccctgcccatctgtaaggaatttggcaacttatcacaactgaatttcttgggattgagtgctatgaagctgcaaaaattagatttgctgccaattgctcacttgcatctaagttatatccttctggatttaagaaattattatataaaagaaaatgagacagaaagtctacaaattctgaatgcaaaaacccttcaccttgtttttcacccaactagtttattcgctatccaagtgaacatatcagttaatactttagggtgcttacaactgactaatattaaattgaatgatgacaactgtcaagttttcattaaatttttatcagaactcaccagaggtccaaccttactgaattttaccctcaaccacatagaaacgacttggaaatgcctggtcagagtctttcaatttctttggcccaaacctgtggaatatctcaatatttacaatttaacaataattgaaagcattcgtgaagaagattttacttattctaaaacgacattgaaagcattgacaatagaacatatcacgaaccaagtttttctgttttcacagacagctttgtacaccgtgttttctgagatgaacattatgatgttaaccatttcagatacaccttttatacacatgctgtgtcctcatgcaccaagcacattcaagtttttgaactttacccagaacgttttcacagatagtatttttgaaaaatgttccacgttagttaaattggagacacttatcttacaaaagaatggattaaaagaccttttcaaagtaggtctcatgacgaaggatatgccttctttggaaatactggatgttagctggaattctttggaatctggtagacataaagaaaactgcacttgggttgagagtatagtggtgttaaatttgtcttcaaatatgcttactgactctgttttcagatgtttacctcccaggatcaaggtacttgatcttcacagcaataaaataaagagcattcctaaacaagtcgtaaaactggaagctttgcaagaactcaatgttgctttcaattctttaactgaccttcctggatgtggcagctttagcagcctttctgtattgatcattgatcacaattcagtttcccacccatcggctgatttcttccagagctgccagaagatgaggtcaataaaagcaggggacaatccattccaatgtacctgtgagctaagagaatttgtcaaaaatatagaccaagtatcaagtgaagtgttagagggctggcctgattcttataagtgtgactacccagaaagttatagaggaagcccactaaaggactttcacatgtctgaattatcctgcaacataactctgctgatcgtcaccatcggtgccaccatgctggtgttggctgtgactgtgacctccctctgcatctacttggatctgccctggtatctcaggatggtgtgccagtggacccagactcggcgcagggccaggaacatacccttagaagaactccaaagaaacctccagtttcatgcttttatttcatatagtgaacatgattctgcctgggtgaaaagtgaattggtaccttacctagaaaaagaagatatacagatttgtcttcatgagagaaactttgtccctggcaagagcattgtggaaaatatcatcaactgcattgagaagagttacaagtccatctttgttttgtctcccaactttgtccagagtgagtggtgccattacgaactctattttgcccatcacaatctctttcatgaaggatctaataacttaatcctcatcttactggaacccattccacagaacagcattcccaacaagtaccacaagctgaaggctctcatgacgcagcggacttatttgcagtggcccaaggagaaaagcaaacgtgggctcttttgggctaacattagagccgcttttaatatgaaattaacactagtcactgaaaacaatgatgtgaaatcttaa

SEQ ID NO: 9713 - RNA, 2391 nt, synthetic construct
  misc_feature 1..2391: note = derived and/or modified sequence opt1 fromTLR6__Homo_sapiens__AAY88754
  source 1..2391: mol_type = other RNA
atgaccaaggacaaggagcccatcgtcaagagcttccacttcgtgtgcctgatgatcatcatcgtgggcacccgcatccagttctccgacgggaacgagttcgccgtggacaagagcaagcggggcctcatccacgtcccgaaggacctgcccctgaagacgaaggtgctcgacatgtcccagaactacatcgccgagctccaggtgagcgacatgtccttcctgagcgagctgaccgtcctgcgcctgtcccacaaccggatccagctcctggacctgagcgtgttcaagttcaaccaggacctcgagtacctggacctgtcccacaaccagctccagaagatcagctgccaccccatcgtgtccttccgccacctggacctgagcttcaacgacttcaaggcgctccccatctgcaaggagttcgggaacctgtcccagctgaacttcctcggcctgagcgccatgaagctgcagaagctcgacctgctgccgatcgcccacctccacctgtcctacatcctgctcgacctgcggaactactacatcaaggagaacgagaccgagagcctgcagatcctcaacgccaagaccctgcacctggtcttccaccccacgtccctcttcgccatccaggtgaacatcagcgtgaacaccctggggtgcctgcagctcaccaacatcaagctgaacgacgacaactgccaggtcttcatcaagttcctgtccgagctcacccgcggccccacgctgctgaacttcaccctcaaccacatcgagaccacctggaagtgcctggtgcgggtgttccagttcctgtggcccaagccggtcgagtacctcaacatctacaacctgacgatcatcgagagcatccgcgaggaggacttcacctacagcaagaccaccctgaaggcgctgacgatcgagcacatcaccaaccaggtgttcctcttctcccagaccgccctgtacaccgtgttcagcgagatgaacatcatgatgctgacgatctccgacacccccttcatccacatgctctgcccccacgcccccagcaccttcaagttcctgaacttcacccagaacgtcttcacggactccatcttcgagaagtgcagcaccctggtgaagctcgagaccctgatcctgcagaagaacggcctcaaggacctgttcaaggtggggctgatgaccaaggacatgccgtccctcgagatcctggacgtcagctggaactccctggagagcggccggcacaaggagaactgcacgtgggtggagtccatcgtggtcctcaacctgagctccaacatgctgaccgacagcgtgttccgctgcctcccgccccggatcaaggtcctggacctgcactccaacaagatcaagagcatccccaagcaggtcgtgaagctcgaggccctgcaggagctgaacgtggcgttcaactccctcaccgacctgcccgggtgcggcagcttctccagcctgagcgtgctcatcatcgaccacaactccgtgagccacccctccgccgacttcttccagagctgccagaagatgcgctccatcaaggccggggacaaccccttccagtgcacgtgcgagctgcgggagttcgtcaagaacatcgaccaggtgagctccgaggtgctggagggctggcccgacagctacaagtgcgactacccggagtcctaccgcggcagccccctcaaggacttccacatgtccgagctgagctgcaacatcaccctgctcatcgtcaccatcggggccaccatgctggtgctggccgtgaccgtcacgtccctctgcatctacctggacctgccctggtacctccggatggtgtgccagtggacccagacccgccggcgcgcgcggaacatccccctggaggagctgcagcgcaacctccagttccacgccttcatcagctactccgagcacgacagcgcctgggtgaagtccgagctggtcccgtacctggagaaggaggacatccagatctgcctccacgagcggaacttcgtgcccggcaagagcatcgtggagaacatcatcaactgcatcgagaagtcctacaagagcatcttcgtcctgagccccaacttcgtgcagtccgagtggtgccactacgagctgtacttcgcccaccacaacctcttccacgaggggagcaacaacctgatcctgatcctcctggagcccatcccgcagaactccatccccaacaagtaccacaagctgaaggccctcatgacccagcgcacctacctgcagtggcccaaggagaagtccaagcgcggcctgttctgggcgaacatccgggccgccttcaacatgaagctcacgctggtgaccgagaacaacgacgtcaagagctga

SEQ ID NO: 9714 - RNA, 2391 nt, synthetic construct
  misc_feature 1..2391: note = derived and/or modified sequence opt2 fromTLR6__Homo_sapiens__AAY88754
  source 1..2391: mol_type = other RNA
atgaccaaggacaaggagcccatcgtcaagtccttccacttcgtctgcctcatgatcatcatcgtcggcacccgcatccagttctccgacggcaacgagttcgccgtcgacaagtccaagcgcggcctcatccacgtccccaaggacctccccctcaagaccaaggtcctcgacatgtcccagaactacatcgccgagctccaggtctccgacatgtccttcctctccgagctcaccgtcctccgcctctcccacaaccgcatccagctcctcgacctctccgtcttcaagttcaaccaggacctcgagtacctcgacctctcccacaaccagctccagaagatctcctgccaccccatcgtctccttccgccacctcgacctctccttcaacgacttcaaggccctccccatctgcaaggagttcggcaacctctcccagctcaacttcctcggcctctccgccatgaagctccagaagctcgacctcctccccatcgcccacctccacctctcctacatcctcctcgacctccgcaactactacatcaaggagaacgagaccgagtccctccagatcctcaacgccaagaccctccacctcgtcttccaccccacctccctcttcgccatccaggtcaacatctccgtcaacaccctcggctgcctccagctcaccaacatcaagctcaacgacgacaactgccaggtcttcatcaagttcctctccgagctcacccgcggccccaccctcctcaacttcaccctcaaccacatcgagaccacctggaagtgcctcgtccgcgtcttccagttcctctggcccaagcccgtcgagtacctcaacatctacaacctcaccatcatcgagtccatccgcgaggaggacttcacctactccaagaccaccctcaaggccctcaccatcgagcacatcaccaaccaggtcttcctcttctcccagaccgccctctacaccgtcttctccgagatgaacatcatgatgctcaccatctccgacacccccttcatccacatgctctgcccccacgccccctccaccttcaagttcctcaacttcacccagaacgtcttcaccgactccatcttcgagaagtgctccaccctcgtcaagctcgagaccctcatcctccagaagaacggcctcaaggacctcttcaaggtcggcctcatgaccaaggacatgccctccctcgagatcctcgacgtctcctggaactccctcgagtccggccgccacaaggagaactgcacctgggtcgagtccatcgtcgtcctcaacctctcctccaacatgctcaccgactccgtcttccgctgcctccccccccgcatcaaggtcctcgacctccactccaacaagatcaagtccatccccaagcaggtcgtcaagctcgaggccctccaggagctcaacgtcgccttcaactccctcaccgacctccccggctgcggctccttctcctccctctccgtcctcatcatcgaccacaactccgtctcccacccctccgccgacttcttccagtcctgccagaagatgcgctccatcaaggccggcgacaaccccttccagtgcacctgcgagctccgcgagttcgtcaagaacatcgaccaggtctcctccgaggtcctcgagggctggcccgactcctacaagtgcgactaccccgagtcctaccgcggctcccccctcaaggacttccacatgtccgagctctcctgcaacatcaccctcctcatcgtcaccatcggcgccaccatgctcgtcctcgccgtcaccgtcacctccctctgcatctacctcgacctcccctggtacctccgcatggtctgccagtggacccagacccgccgccgcgcccgcaacatccccctcgaggagctccagcgcaacctccagttccacgccttcatctcctactccgagcacgactccgcctgggtcaagtccgagctcgtcccctacctcgagaaggaggacatccagatctgcctccacgagcgcaacttcgtccccggcaagtccatcgtcgagaacatcatcaactgcatcgagaagtcctacaagtccatcttcgtcctctcccccaacttcgtccagtccgagtggtgccactacgagctctacttcgcccaccacaacctcttccacgagggctccaacaacctcatcctcatcctcctcgagcccatcccccagaactccatccccaacaagtaccacaagctcaaggccctcatgacccagcgcacctacctccagtggcccaaggagaagtccaagcgcggcctcttctgggccaacatccgcgccgccttcaacatgaagctcaccctcgtcaccgagaacaacgacgtcaagtcctga

SEQ ID NO: 9715 - RNA, 2391 nt, synthetic construct
  misc_feature 1..2391: note = derived and/or modified sequence opt3 fromTLR6__Homo_sapiens__AAY88754
  source 1..2391: mol_type = other RNA
atgaccaaggacaaagagcccatcgtcaagagcttccactttgtgtgcctgatgattataatcgttggcacaaggattcagttctccgatgggaacgaatttgccgtggacaaatctaagagaggactcatccatgtacctaaagatcttccactgaagactaaggtgttggacatgtcacaaaattacattgctgagttacaggtcagtgatatgagcttcctgtccgaactaacggtgctccggctgtctcacaaccgcatccagcttctggacttgtcggtttttaaattcaatcaggatctcgagtatctggacctgtcacataaccaactccagaagataagctgtcacccgatcgtgagttttcgacatttagatctgtccttcaatgactttaaagcacttcccatttgcaaggagttcggtaacttgtctcagctgaattttctaggcctcagcgccatgaaactgcagaaacttgatctgttgcctatcgcgcacctccacctgtcctacattttactggacctccgtaactattacatcaaggagaatgagaccgaatcacttcaaatactgaacgctaagacattgcatctagtcttccacccaacttccctgtttgccattcaggtgaatatcagcgtaaacaccctcgggtgtctgcagcttacaaatattaagctgaacgatgacaattgccaggttttcatcaaattcttgtctgagctcaccagaggacccactctgttaaactttacactgaaccatatcgaaaccacgtggaagtgtctagtgagggtcttccaatttctctggcctaaaccagtggagtatctgaatatttacaaccttactataatcgagtccattcgggaagaggacttcacctattcaaagacaactttgaaagcactgaccatcgaacacataacaaatcaggtgtttctcttcagccagaccgccctgtacacggtctttagtgagatgaacattatgatgcttactatctctgatacacccttcatccacatgctgtgccctcatgctccatccacctttaagttcttgaattttactcaaaacgttttcacagacagcatttttgaaaagtgttcgaccctcgtgaaactggagacgttaatcctgcagaagaatggcctaaaagatctcttcaaggtaggtctgatgaccaaagacatgccgtctcttgagattttggatgtgtcctggaactcactggaaagtgggcgccacaaggagaattgcacatgggtcgaaagcatagtggttctcaacctgtcctctaatatgttaactgacagcgtgttcagatgtctgccccctaggatcaaggtccttgatttgcattcaaacaaaattaagagtatcccaaaacaggtggtaaagctcgaggcactgcaggaactaaatgttgcctttaactccctgaccgacctccccggatgcggcagcttctcttcactgagtgtgcttatcattgatcacaatagcgtctcccatccttctgctgactttttccaatcgtgtcagaaaatgcggagcataaaggccggcgataacccatttcagtgcacatgcgagttgcgcgagttcgtgaagaacatcgaccaggtctcctcagaagtgctggaggggtggcccgacagttacaaatgtgattatccggaatcttaccgaggaagccctttaaaggactttcacatgtccgagctctcatgcaatattactctgcttatcgttaccattggtgcgacaatgctggtgttggcagtaaccgtcactagcctctgtatctatctggatctaccctggtacctgagaatggtgtgccaatggacgcagacaaggcggcgtgcccgcaacataccactcgaagaactgcagagaaatcttcagttccacgcttttatctcttattccgagcatgacagtgcctgggttaaaagcgaattggtgccttacctggagaaggaagatattcaaatctgtttacacgagaggaacttcgtccccggcaaatctattgtggagaatatcataaactgcattgaaaagtcctataagtcaatctttgtactcagtccaaatttcgtgcagagcgagtggtgtcattacgaactgtactttgcacaccacaaccttttccatgaggggtcgaataacctgattctaatcctcctggaacccatacctcagaatagtatcccaaacaaatatcacaagttgaaagctctgatgacccagcggacttacttacaatggccgaaggagaaatctaagcgaggactcttctgggccaatattcgcgcggcctttaacatgaaactgacccttgttacagagaataacgacgtcaagagctga

SEQ ID NO: 9716 - RNA, 2391 nt, synthetic construct
  misc_feature 1..2391: note = derived and/or modified sequence opt4 fromTLR6__Homo_sapiens__AAY88754
  source 1..2391: mol_type = other RNA
atgaccaaggacaaggagcccatcgtgaagagcttccacttcgtgtgcctgatgatcatcatcgtgggcaccagaatccagttcagcgacggcaacgagttcgccgtggacaagagcaagagaggcctgatccacgtgcccaaggacctgcccctgaagaccaaggtgctggacatgagccagaactacatcgccgagctgcaggtgagcgacatgagcttcctgagcgagctgaccgtgctgagactgagccacaacagaatccagctgctggacctgagcgtgttcaagttcaaccaggacctggagtacctggacctgagccacaaccagctgcagaagatcagctgccaccccatcgtgagcttcagacacctggacctgagcttcaacgacttcaaggccctgcccatctgcaaggagttcggcaacctgagccagctgaacttcctgggcctgagcgccatgaagctgcagaagctggacctgctgcccatcgcccacctgcacctgagctacatcctgctggacctgagaaactactacatcaaggagaacgagaccgagagcctgcagatcctgaacgccaagaccctgcacctggtgttccaccccaccagcctgttcgccatccaggtgaacatcagcgtgaacaccctgggctgcctgcagctgaccaacatcaagctgaacgacgacaactgccaggtgttcatcaagttcctgagcgagctgaccagaggccccaccctgctgaacttcaccctgaaccacatcgagaccacctggaagtgcctggtgagagtgttccagttcctgtggcccaagcccgtggagtacctgaacatctacaacctgaccatcatcgagagcatcagagaggaggacttcacctacagcaagaccaccctgaaggccctgaccatcgagcacatcaccaaccaggtgttcctgttcagccagaccgccctgtacaccgtgttcagcgagatgaacatcatgatgctgaccatcagcgacacccccttcatccacatgctgtgcccccacgcccccagcaccttcaagttcctgaacttcacccagaacgtgttcaccgacagcatcttcgagaagtgcagcaccctggtgaagctggagaccctgatcctgcagaagaacggcctgaaggacctgttcaaggtgggcctgatgaccaaggacatgcccagcctggagatcctggacgtgagctggaacagcctggagagcggcagacacaaggagaactgcacctgggtggagagcatcgtggtgctgaacctgagcagcaacatgctgaccgacagcgtgttcagatgcctgccccccagaatcaaggtgctggacctgcacagcaacaagatcaagagcatccccaagcaggtggtgaagctggaggccctgcaggagctgaacgtggccttcaacagcctgaccgacctgcccggctgcggcagcttcagcagcctgagcgtgctgatcatcgaccacaacagcgtgagccaccccagcgccgacttcttccagagctgccagaagatgagaagcatcaaggccggcgacaaccccttccagtgcacctgcgagctgagagagttcgtgaagaacatcgaccaggtgagcagcgaggtgctggagggctggcccgacagctacaagtgcgactaccccgagagctacagaggcagccccctgaaggacttccacatgagcgagctgagctgcaacatcaccctgctgatcgtgaccatcggcgccaccatgctggtgctggccgtgaccgtgaccagcctgtgcatctacctggacctgccctggtacctgagaatggtgtgccagtggacccagaccagaagaagagccagaaacatccccctggaggagctgcagagaaacctgcagttccacgccttcatcagctacagcgagcacgacagcgcctgggtgaagagcgagctggtgccctacctggagaaggaggacatccagatctgcctgcacgagagaaacttcgtgcccggcaagagcatcgtggagaacatcatcaactgcatcgagaagagctacaagagcatcttcgtgctgagccccaacttcgtgcagagcgagtggtgccactacgagctgtacttcgcccaccacaacctgttccacgagggcagcaacaacctgatcctgatcctgctggagcccatcccccagaacagcatccccaacaagtaccacaagctgaaggccctgatgacccagagaacctacctgcagtggcccaaggagaagagcaagagaggcctgttctgggccaacatcagagccgccttcaacatgaagctgaccctggtgaccgagaacaacgacgtgaagagctga

SEQ ID NO: 9717 - RNA, 2391 nt, synthetic construct
  misc_feature 1..2391: note = derived and/or modified sequence opt5 fromTLR6__Homo_sapiens__AAY88754
  source 1..2391: mol_type = other RNA
atgaccaaggacaaagagcccatcgtgaagtccttccactttgtgtgcctgatgattatcattgttggcacaagaatccagttctccgatgggaacgaatttgccgtggacaaatctaagcggggactcattcatgtgcctaaagatctgccgcttaagacgaaggtcctggacatgagccaaaattacatcgctgagctccaggtgtccgatatgtctttcctgagcgaacttaccgttctgcgcctctcccacaacagaatccagctgctggacctctctgtgtttaaattcaatcaggatctggagtatcttgacctgagccataaccaactccagaagatttcctgtcaccccatcgtcagctttcggcatctggatctttctttcaatgactttaaagccctgcctatttgcaaggagttcggcaacctctcccagctgaattttctggggctcagcgcgatgaaactgcagaagctcgatctgctccccatcgctcatctgcacctttcttacattctgctcgacctgcgcaactattacatcaaggagaatgagacagaatccctgcaaattctcaacgccaaaaccctgcaccttgtgttccaccctacaagcctgtttgccatccaggttaatatctctgtgaacaccctcggatgtctgcagcttacaaatattaagctgaacgatgacaattgccaggtcttcatcaaattcctctccgagctgaccagaggccccacgctgctcaactttaccctgaaccatattgaaacaacctggaagtgtcttgtgcgggtgttccaatttctgtggcctaaaccggtcgagtatctcaatatctacaacctgacaattatcgagagcatccgcgaagaggacttcacctattccaagacgacactgaaagctcttaccattgaacacatcacaaatcaggtttttctcttctctcagaccgccctgtacaccgtgtttagcgagatgaacattatgatgctgacaatctccgatacgcccttcattcacatgctctgccctcatgctcccagcacctttaagttcctgaattttacacaaaacgtgttcaccgactctatctttgaaaagtgttccacacttgtcaaactggagaccctcatcctgcagaagaatgggctgaaagatcttttcaaggtgggactcatgacgaaagacatgcctagcctggagattctggatgtttcttggaacagcctcgaatccggcagacacaaggagaattgcacatgggtggaatctatcgtcgtgctgaaccttagctccaatatgctgaccgacagcgttttccggtgtcttcccccgcgcattaaggtgctggatctgcattctaacaaaatcaagtccattcctaaacaggtcgtgaaacttgaggccctccaggaactgaatgtcgcgtttaacagcctgaccgacctccccggctgcgggtctttctccagcctgtccgtgcttatcattgatcacaattctgttagccatccttccgccgactttttccaatcttgtcagaagatgagaagcatcaaggctggagataacccctttcagtgcacatgcgagctgcgggagttcgtgaagaacatcgaccaggtctccagcgaagtgctcgagggctggcccgactcttacaaatgtgattatcctgaatcctaccgcgggagcccgctgaaggactttcacatgtctgagctgtcctgcaatattacccttctcatcgttacaattggagccacgatgctggtgctggctgtcaccgtgacaagcctctgtatctatctggatcttccctggtacctgagaatggtgtgccaatggacccagacacggcgcagagcccggaacattcctctcgaagaactgcagagaaatctgcagttccacgcgtttatctcttatagcgagcatgactccgcctgggttaaaagcgaacttgtcccctacctggagaaggaagatatccaaatttgtctccacgagcgcaacttcgtgcctggcaaatctatcgtggagaatattatcaactgcattgaaaagtcctataagagcatctttgtcctgtcccccaatttcgtgcagtctgagtggtgtcattacgaactctactttgctcaccacaacctgttccatgaggggagcaataaccttatcctgattctcctggaaccgatccctcagaatagcattcccaacaaatatcacaagctgaaagcccttatgacccagcggacgtacctgcaatggcctaaggagaaatctaagagaggactcttctgggctaatatccgcgccgcctttaacatgaaactgaccctcgttacagagaataacgacgtcaagagctga

SEQ ID NO: 9718 - protein, 796 aa, synthetic construct [sequence omitted]

SEQ ID NO: 9719 - RNA, 2391 nt, synthetic construct
  misc_feature 1..2391: note = TLR6__Homo_sapiens__AAY88755
  source 1..2391: mol_type = other RNA
atgaccaaagacaaagaacctattgttaaaagcttccattttgtttgccttatgatcataatagttggaaccagaatccagttctccgacggaaatgaatttgcagtagacaagtcaaaaagaggtcttattcatgttccaaaagacctaccgctgaaaaccaaagtcttagatatgtctcagaactacatcgctgagcttcaggtctctgacatgagctttctatcagagttgacagttttgagactttcccataacagaatccagctacttgatttaagtgttttcaagttcaaccaggatttagaatatttggatttatctcataatcagttgcaaaagatatcctgccatcctattgtgagtttcaggcatttagatctctcattcaatgatttcaaggccctgcccatctgtaaggaatttggcaacttatcacaactgaatttcttgggattgagtgctatgaagctgcaaaaattagatttgctgccaattgctcacttgcatctaagttatatccttctggatttaagaaattattatataaaagaaaatgagacagaaagtctacaaattctgaatgcaaaaacccttcaccttgtttttcacccaactagtttattcgctatccaagtgaacatatcagttaatactttagggtgcttacaactgactaatattaaattgaatgatgacaactgtcaagttttcattaaatttttatcagaactcaccagaggtccaaccttactgaattttaccctcaaccacatagaaacgacttggaaatgcctggtcagagtctttcaatttctttggcccaaacctgtggaatatctcaatatttacaatttaacaataattgaaagcattcgtgaagaagattttacttattctaaaacgacattgaaagcattgacaatagaacatatcacgaaccaagtttttctgttttcacagacagctttgtacaccgtgttttctgagatgaacattatgatgttaaccatttcagatacaccttttatacacatgctgtgtcctcatgcaccaagcacattcaagtttttgaactttacccagaacgttttcacagatagtatttttgaaaaatgttccacgttagttaaattggagacacttatcttacaaaagaatggattaaaagaccttttcaaagtaggtctcatgacgaaggatatgccttctttggaaatactggatgttagctggaattctttggaatctggtagacataaagaaaactgcacttgggttgagagtatagtggtgttaaatttgtcttcaaatatgcttactgactctgttttcagatgtttacctcccaggatcaaggtacttgatcttcacagcaataaaataaagagcattcctaaacaagtcgtaaaactggaagctttgcaagaactcaatgttgctttcaattctttaactgaccttcctggatgtggcagctttagcagcctttctgtattgatcattgatcacaattcagtttcccacccatcggctgatttcttccagagctgccagaagatgaggtcaataaaagcaggggacaatccattccaatgtacctgtgagctaagagaatttgtcaaaaatatagaccaagtatcaagtgaagtgttagagggctggcctgattcttataagtgtgactacccagaaagttatagaggaagcccactaaaggactttcacatgtctgaattatcctgcaacataactctgctgatcgtcaccatcggtgccaccatgctggtgttggctgtgactgtgacctccctctgcatctacttggatctgccctggtatctcaggatggtgtgccagtggacccagactcggcgcagggccaggaacatacccttagaagaactccaaagaaacctccagtttcatgcttttatttcatatagtgaacatgattctgcctgggtgaaaagtgaattggtaccttacctagaaaaagaagatatacagatttgtcttcatgagagaaactttgtccctggcaagagcattgtggaaaatatcatcaactgcattgagaagagttacaagtccatctttgttttgtctcccaactttgtccagagtgagtggtgccattacgaactctattttgcccatcacaatctctttcatgaaggatctaataacttaatcctcatcttactggaacccattccacagaacagcattcccaacaagtaccacaagctgaaggctctcatgatgcagcggacttatttgcagtggcccaaggagaaaagcaaacgtgggctcttttgggctaacattagagccgcttttaatatgaaattaacactagtcactgaaaacaatgatgtgaaatcttaa

SEQ ID NO: 9720 - RNA, 2391 nt, synthetic construct
  misc_feature 1..2391: note = derived and/or modified sequence opt1 fromTLR6__Homo_sapiens__AAY88755
  source 1..2391: mol_type = other RNA
atgaccaaggacaaggagcccatcgtcaagagcttccacttcgtgtgcctgatgatcatcatcgtgggcacccgcatccagttctccgacgggaacgagttcgccgtggacaagagcaagcggggcctcatccacgtcccgaaggacctgcccctgaagacgaaggtgctcgacatgtcccagaactacatcgccgagctccaggtgagcgacatgtccttcctgagcgagctgaccgtcctgcgcctgtcccacaaccggatccagctcctggacctgagcgtgttcaagttcaaccaggacctcgagtacctggacctgtcccacaaccagctccagaagatcagctgccaccccatcgtgtccttccgccacctggacctgagcttcaacgacttcaaggcgctccccatctgcaaggagttcgggaacctgtcccagctgaacttcctcggcctgagcgccatgaagctgcagaagctcgacctgctgccgatcgcccacctccacctgtcctacatcctgctcgacctgcggaactactacatcaaggagaacgagaccgagagcctgcagatcctcaacgccaagaccctgcacctggtcttccaccccacgtccctcttcgccatccaggtgaacatcagcgtgaacaccctggggtgcctgcagctcaccaacatcaagctgaacgacgacaactgccaggtcttcatcaagttcctgtccgagctcacccgcggccccacgctgctgaacttcaccctcaaccacatcgagaccacctggaagtgcctggtgcgggtgttccagttcctgtggcccaagccggtcgagtacctcaacatctacaacctgacgatcatcgagagcatccgcgaggaggacttcacctacagcaagaccaccctgaaggcgctgacgatcgagcacatcaccaaccaggtgttcctcttctcccagaccgccctgtacaccgtgttcagcgagatgaacatcatgatgctgacgatctccgacacccccttcatccacatgctctgcccccacgcccccagcaccttcaagttcctgaacttcacccagaacgtcttcacggactccatcttcgagaagtgcagcaccctggtgaagctcgagaccctgatcctgcagaagaacggcctcaaggacctgttcaaggtggggctgatgaccaaggacatgccgtccctcgagatcctggacgtcagctggaactccctggagagcggccggcacaaggagaactgcacgtgggtggagtccatcgtggtcctcaacctgagctccaacatgctgaccgacagcgtgttccgctgcctcccgccccggatcaaggtcctggacctgcactccaacaagatcaagagcatccccaagcaggtcgtgaagctcgaggccctgcaggagctgaacgtggcgttcaactccctcaccgacctgcccgggtgcggcagcttctccagcctgagcgtgctcatcatcgaccacaactccgtgagccacccctccgccgacttcttccagagctgccagaagatgcgctccatcaaggccggggacaaccccttccagtgcacgtgcgagctgcgggagttcgtcaagaacatcgaccaggtgagctccgaggtgctggagggctggcccgacagctacaagtgcgactacccggagtcctaccgcggcagccccctcaaggacttccacatgtccgagctgagctgcaacatcaccctgctcatcgtcaccatcggggccaccatgctggtgctggccgtgaccgtcacgtccctctgcatctacctggacctgccctggtacctccggatggtgtgccagtggacccagacccgccggcgcgcgcggaacatccccctggaggagctgcagcgcaacctccagttccacgccttcatcagctactccgagcacgacagcgcctgggtgaagtccgagctggtcccgtacctggagaaggaggacatccagatctgcctccacgagcggaacttcgtgcccggcaagagcatcgtggagaacatcatcaactgcatcgagaagtcctacaagagcatcttcgtcctgagccccaacttcgtgcagtccgagtggtgccactacgagctgtacttcgcccaccacaacctcttccacgaggggagcaacaacctgatcctgatcctcctggagcccatcccgcagaactccatccccaacaagtaccacaagctgaaggccctcatgatgcagcgcacctacctgcagtggcccaaggagaagtccaagcgcggcctgttctgggcgaacatccgggccgccttcaacatgaagctcaccctggtgacggagaacaacgacgtcaagagctga

SEQ ID NO: 9721 - RNA, 2391 nt, synthetic construct
  misc_feature 1..2391: note = derived and/or modified sequence opt2 fromTLR6__Homo_sapiens__AAY88755
  source 1..2391: mol_type = other RNA
atgaccaaggacaaggagcccatcgtcaagtccttccacttcgtctgcctcatgatcatcatcgtcggcacccgcatccagttctccgacggcaacgagttcgccgtcgacaagtccaagcgcggcctcatccacgtccccaaggacctccccctcaagaccaaggtcctcgacatgtcccagaactacatcgccgagctccaggtctccgacatgtccttcctctccgagctcaccgtcctccgcctctcccacaaccgcatccagctcctcgacctctccgtcttcaagttcaaccaggacctcgagtacctcgacctctcccacaaccagctccagaagatctcctgccaccccatcgtctccttccgccacctcgacctctccttcaacgacttcaaggccctccccatctgcaaggagttcggcaacctctcccagctcaacttcctcggcctctccgccatgaagctccagaagctcgacctcctccccatcgcccacctccacctctcctacatcctcctcgacctccgcaactactacatcaaggagaacgagaccgagtccctccagatcctcaacgccaagaccctccacctcgtcttccaccccacctccctcttcgccatccaggtcaacatctccgtcaacaccctcggctgcctccagctcaccaacatcaagctcaacgacgacaactgccaggtcttcatcaagttcctctccgagctcacccgcggccccaccctcctcaacttcaccctcaaccacatcgagaccacctggaagtgcctcgtccgcgtcttccagttcctctggcccaagcccgtcgagtacctcaacatctacaacctcaccatcatcgagtccatccgcgaggaggacttcacctactccaagaccaccctcaaggccctcaccatcgagcacatcaccaaccaggtcttcctcttctcccagaccgccctctacaccgtcttctccgagatgaacatcatgatgctcaccatctccgacacccccttcatccacatgctctgcccccacgccccctccaccttcaagttcctcaacttcacccagaacgtcttcaccgactccatcttcgagaagtgctccaccctcgtcaagctcgagaccctcatcctccagaagaacggcctcaaggacctcttcaaggtcggcctcatgaccaaggacatgccctccctcgagatcctcgacgtctcctggaactccctcgagtccggccgccacaaggagaactgcacctgggtcgagtccatcgtcgtcctcaacctctcctccaacatgctcaccgactccgtcttccgctgcctccccccccgcatcaaggtcctcgacctccactccaacaagatcaagtccatccccaagcaggtcgtcaagctcgaggccctccaggagctcaacgtcgccttcaactccctcaccgacctccccggctgcggctccttctcctccctctccgtcctcatcatcgaccacaactccgtctcccacccctccgccgacttcttccagtcctgccagaagatgcgctccatcaaggccggcgacaaccccttccagtgcacctgcgagctccgcgagttcgtcaagaacatcgaccaggtctcctccgaggtcctcgagggctggcccgactcctacaagtgcgactaccccgagtcctaccgcggctcccccctcaaggacttccacatgtccgagctctcctgcaacatcaccctcctcatcgtcaccatcggcgccaccatgctcgtcctcgccgtcaccgtcacctccctctgcatctacctcgacctcccctggtacctccgcatggtctgccagtggacccagacccgccgccgcgcccgcaacatccccctcgaggagctccagcgcaacctccagttccacgccttcatctcctactccgagcacgactccgcctgggtcaagtccgagctcgtcccctacctcgagaaggaggacatccagatctgcctccacgagcgcaacttcgtccccggcaagtccatcgtcgagaacatcatcaactgcatcgagaagtcctacaagtccatcttcgtcctctcccccaacttcgtccagtccgagtggtgccactacgagctctacttcgcccaccacaacctcttccacgagggctccaacaacctcatcctcatcctcctcgagcccatcccccagaactccatccccaacaagtaccacaagctcaaggccctcatgatgcagcgcacctacctccagtggcccaaggagaagtccaagcgcggcctcttctgggccaacatccgcgccgccttcaacatgaagctcaccctcgtcaccgagaacaacgacgtcaagtcctga

SEQ ID NO: 9722 - RNA, 2391 nt, synthetic construct
  misc_feature 1..2391: note = derived and/or modified sequence opt3 fromTLR6__Homo_sapiens__AAY88755
  source 1..2391: mol_type = other RNA
atgaccaaggacaaagagcccatcgtcaagagcttccactttgtgtgcctgatgattataatcgttggcacaaggattcagttctccgatgggaacgaatttgccgtggacaaatctaagagaggactcatccatgtacctaaagatcttccactgaagactaaggtgttggacatgtcacaaaattacattgctgagttacaggtcagtgatatgagcttcctgtccgaactaacggtgctccggctgtctcacaaccgcatccagcttctggacttgtcggtttttaaattcaatcaggatctcgagtatctggacctgtcacataaccaactccagaagataagctgtcacccgatcgtgagttttcgacatttagatctgtccttcaatgactttaaagcacttcccatttgcaaggagttcggtaacttgtctcagctgaattttctaggcctcagcgccatgaaactgcagaaacttgatctgttgcctatcgcgcacctccacctgtcctacattttactggacctccgtaactattacatcaaggagaatgagaccgaatcacttcaaatactgaacgctaagacattgcatctagtcttccacccaacttccctgtttgccattcaggtgaatatcagcgtaaacaccctcgggtgtctgcagcttacaaatattaagctgaacgatgacaattgccaggttttcatcaaattcttgtctgagctcaccagaggacccactctgttaaactttacactgaaccatatcgaaaccacgtggaagtgtctagtgagggtcttccaatttctctggcctaaaccagtggagtatctgaatatttacaaccttactataatcgagtccattcgggaagaggacttcacctattcaaagacaactttgaaagcactgaccatcgaacacataacaaatcaggtgtttctcttcagccagaccgccctgtacacggtctttagtgagatgaacattatgatgcttactatctctgatacacccttcatccacatgctgtgccctcatgctccatccacctttaagttcttgaattttactcaaaacgttttcacagacagcatttttgaaaagtgttcgaccctcgtgaaactggagacgttaatcctgcagaagaatggcctaaaagatctcttcaaggtaggtctgatgaccaaagacatgccgtctcttgagattttggatgtgtcctggaactcactggaaagtgggcgccacaaggagaattgcacatgggtcgaaagcatagtggttctcaacctgtcctctaatatgttaactgacagcgtgttcagatgtctgccccctaggatcaaggtccttgatttgcattcaaacaaaattaagagtatcccaaaacaggtggtaaagctcgaggcactgcaggaactaaatgttgcctttaactccctgaccgacctccccggatgcggcagcttctcttcactgagtgtgcttatcattgatcacaatagcgtctcccatccttctgctgactttttccaatcgtgtcagaaaatgcggagcataaaggccggcgataacccatttcagtgcacatgcgagttgcgcgagttcgtgaagaacatcgaccaggtctcctcagaagtgctggaggggtggcccgacagttacaaatgtgattatccggaatcttaccgaggaagccctttaaaggactttcacatgtccgagctctcatgcaatattactctgcttatcgttaccattggtgcgacaatgctggtgttggcagtaaccgtcactagcctctgtatctatctggatctaccctggtacctgagaatggtgtgccaatggacgcagacaaggcggcgtgcccgcaacataccactcgaagaactgcagagaaatcttcagttccacgcttttatctcttattccgagcatgacagtgcctgggttaaaagcgaattggtgccttacctggagaaggaagatattcaaatctgtttacacgagaggaacttcgtccccggcaaatctattgtggagaatatcataaactgcattgaaaagtcctataagtcaatctttgtactcagtccaaatttcgtgcagagcgagtggtgtcattacgaactgtactttgcacaccacaaccttttccatgaggggtcgaataacctgattctaatcctcctggaacccatacctcagaatagtatcccaaacaaatatcacaagttgaaagctctgatgatgcagcggacctacttacaatggccgaaggagaaatctaagcgaggactcttctgggccaatattcgcgcggcctttaacatgaaactgactcttgttaccgagaataacgacgtcaagagctga

SEQ ID NO: 9723 - RNA, 2391 nt, synthetic construct
  misc_feature 1..2391: note = derived and/or modified sequence opt4 fromTLR6__Homo_sapiens__AAY88755
  source 1..2391: mol_type = other RNA
atgaccaaggacaaggagcccatcgtgaagagcttccacttcgtgtgcctgatgatcatcatcgtgggcaccagaatccagttcagcgacggcaacgagttcgccgtggacaagagcaagagaggcctgatccacgtgcccaaggacctgcccctgaagaccaaggtgctggacatgagccagaactacatcgccgagctgcaggtgagcgacatgagcttcctgagcgagctgaccgtgctgagactgagccacaacagaatccagctgctggacctgagcgtgttcaagttcaaccaggacctggagtacctggacctgagccacaaccagctgcagaagatcagctgccaccccatcgtgagcttcagacacctggacctgagcttcaacgacttcaaggccctgcccatctgcaaggagttcggcaacctgagccagctgaacttcctgggcctgagcgccatgaagctgcagaagctggacctgctgcccatcgcccacctgcacctgagctacatcctgctggacctgagaaactactacatcaaggagaacgagaccgagagcctgcagatcctgaacgccaagaccctgcacctggtgttccaccccaccagcctgttcgccatccaggtgaacatcagcgtgaacaccctgggctgcctgcagctgaccaacatcaagctgaacgacgacaactgccaggtgttcatcaagttcctgagcgagctgaccagaggccccaccctgctgaacttcaccctgaaccacatcgagaccacctggaagtgcctggtgagagtgttccagttcctgtggcccaagcccgtggagtacctgaacatctacaacctgaccatcatcgagagcatcagagaggaggacttcacctacagcaagaccaccctgaaggccctgaccatcgagcacatcaccaaccaggtgttcctgttcagccagaccgccctgtacaccgtgttcagcgagatgaacatcatgatgctgaccatcagcgacacccccttcatccacatgctgtgcccccacgcccccagcaccttcaagttcctgaacttcacccagaacgtgttcaccgacagcatcttcgagaagtgcagcaccctggtgaagctggagaccctgatcctgcagaagaacggcctgaaggacctgttcaaggtgggcctgatgaccaaggacatgcccagcctggagatcctggacgtgagctggaacagcctggagagcggcagacacaaggagaactgcacctgggtggagagcatcgtggtgctgaacctgagcagcaacatgctgaccgacagcgtgttcagatgcctgccccccagaatcaaggtgctggacctgcacagcaacaagatcaagagcatccccaagcaggtggtgaagctggaggccctgcaggagctgaacgtggccttcaacagcctgaccgacctgcccggctgcggcagcttcagcagcctgagcgtgctgatcatcgaccacaacagcgtgagccaccccagcgccgacttcttccagagctgccagaagatgagaagcatcaaggccggcgacaaccccttccagtgcacctgcgagctgagagagttcgtgaagaacatcgaccaggtgagcagcgaggtgctggagggctggcccgacagctacaagtgcgactaccccgagagctacagaggcagccccctgaaggacttccacatgagcgagctgagctgcaacatcaccctgctgatcgtgaccatcggcgccaccatgctggtgctggccgtgaccgtgaccagcctgtgcatctacctggacctgccctggtacctgagaatggtgtgccagtggacccagaccagaagaagagccagaaacatccccctggaggagctgcagagaaacctgcagttccacgccttcatcagctacagcgagcacgacagcgcctgggtgaagagcgagctggtgccctacctggagaaggaggacatccagatctgcctgcacgagagaaacttcgtgcccggcaagagcatcgtggagaacatcatcaactgcatcgagaagagctacaagagcatcttcgtgctgagccccaacttcgtgcagagcgagtggtgccactacgagctgtacttcgcccaccacaacctgttccacgagggcagcaacaacctgatcctgatcctgctggagcccatcccccagaacagcatccccaacaagtaccacaagctgaaggccctgatgatgcagagaacctacctgcagtggcccaaggagaagagcaagagaggcctgttctgggccaacatcagagccgccttcaacatgaagctgaccctggtgaccgagaacaacgacgtgaagagctga

SEQ ID NO: 9724 - RNA, 2391 nt, synthetic construct
  misc_feature 1..2391: note = derived and/or modified sequence opt5 fromTLR6__Homo_sapiens__AAY88755
  source 1..2391: mol_type = other RNA
atgaccaaggacaaagagcccatcgtgaagtccttccactttgtgtgcctgatgattatcattgttggcacaagaatccagttctccgatgggaacgaatttgccgtggacaaatctaagcggggactcattcatgtgcctaaagatctgccgcttaagacgaaggtcctggacatgagccaaaattacatcgctgagctccaggtgtccgatatgtctttcctgagcgaacttaccgttctgcgcctctcccacaacagaatccagctgctggacctctctgtgtttaaattcaatcaggatctggagtatcttgacctgagccataaccaactccagaagatttcctgtcaccccatcgtcagctttcggcatctggatctttctttcaatgactttaaagccctgcctatttgcaaggagttcggcaacctctcccagctgaattttctggggctcagcgcgatgaaactgcagaagctcgatctgctccccatcgctcatctgcacctttcttacattctgctcgacctgcgcaactattacatcaaggagaatgagacagaatccctgcaaattctcaacgccaaaaccctgcaccttgtgttccaccctacaagcctgtttgccatccaggttaatatctctgtgaacaccctcggatgtctgcagcttacaaatattaagctgaacgatgacaattgccaggtcttcatcaaattcctctccgagctgaccagaggccccacgctgctcaactttaccctgaaccatattgaaacaacctggaagtgtcttgtgcgggtgttccaatttctgtggcctaaaccggtcgagtatctcaatatctacaacctgacaattatcgagagcatccgcgaagaggacttcacctattccaagacgacactgaaagctcttaccattgaacacatcacaaatcaggtttttctcttctctcagaccgccctgtacaccgtgtttagcgagatgaacattatgatgctgacaatctccgatacgcccttcattcacatgctctgccctcatgctcccagcacctttaagttcctgaattttacacaaaacgtgttcaccgactctatctttgaaaagtgttccacacttgtcaaactggagaccctcatcctgcagaagaatgggctgaaagatcttttcaaggtgggactcatgacgaaagacatgcctagcctggagattctggatgtttcttggaacagcctcgaatccggcagacacaaggagaattgcacatgggtggaatctatcgtcgtgctgaaccttagctccaatatgctgaccgacagcgttttccggtgtcttcccccgcgcattaaggtgctggatctgcattctaacaaaatcaagtccattcctaaacaggtcgtgaaacttgaggccctccaggaactgaatgtcgcgtttaacagcctgaccgacctccccggctgcgggtctttctccagcctgtccgtgcttatcattgatcacaattctgttagccatccttccgccgactttttccaatcttgtcagaagatgagaagcatcaaggctggagataacccctttcagtgcacatgcgagctgcgggagttcgtgaagaacatcgaccaggtctccagcgaagtgctcgagggctggcccgactcttacaaatgtgattatcctgaatcctaccgcgggagcccgctgaaggactttcacatgtctgagctgtcctgcaatattacccttctcatcgttacaattggagccacgatgctggtgctggctgtcaccgtgacaagcctctgtatctatctggatcttccctggtacctgagaatggtgtgccaatggacccagacacggcgcagagcccggaacattcctctcgaagaactgcagagaaatctgcagttccacgcgtttatctcttatagcgagcatgactccgcctgggttaaaagcgaacttgtcccctacctggagaaggaagatatccaaatttgtctccacgagcgcaacttcgtgcctggcaaatctatcgtggagaatattatcaactgcattgaaaagtcctataagagcatctttgtcctgtcccccaatttcgtgcagtctgagtggtgtcattacgaactctactttgctcaccacaacctgttccatgaggggagcaataaccttatcctgattctcctggaaccgatccctcagaatagcattcccaacaaatatcacaagctgaaagcccttatgatgcagcggacctacctgcaatggcctaaggagaaatctaagagaggactcttctgggctaatatccgcgccgcctttaacatgaaactgacgctcgttaccgagaataacgacgtcaagagctga

SEQ ID NO: 9725 - protein, 796 aa, synthetic construct [sequence omitted]

SEQ ID NO: 9726 - RNA, 2391 nt, synthetic construct
  misc_feature 1..2391: note = TLR6__Homo_sapiens__AAY88758
  source 1..2391: mol_type = other RNA
atgaccaaagacaaagaacctattgttaaaagcttccattttgtttgccttatgatcataatagttggaaccagaatccagttctccgacggaaatgaatttgcagtagacaagtcaaaaagaggtcttattcatgttccaaaagacctaccgctgaaaaccaaagtcttagatatgtctcagaactacatcgctgagcttcaggtctctgacatgagctttctatcagagttgacagttttgagactttcccataacagaatccagctacttgatttaagtgttttcaagttcaaccaggatttagaatatttggatttatctcataatcagttgcaaaagatatcctgccatcctattgtgagtttcaggcatttagatctctcattcaatgatttcaaggccctgcccatctgtaaggaatttggcaacttatcacaactgaatttcttgggattgagtgctatgaagctgcaaaaattagatttgctgccaattgctcacttgcatctaagttatatccttctggatttaagaaattattatataaaagaaaatgagacagaaagtctacaaattctgaatgcaaaaacccttcaccttgtttttcacccaactagtttattcgctatccaagtgaacatatcagttaatactttagggtgcttacaactgactaatattaaattgaatgatgacaactgtcaagttttcattaaatttttatcagaactcaccagaggtccaaccttactgaattttaccctcaaccacatagaaacgacttggaaatgcctggtcagagtctttcaatttctttggcccaaacctgtggaatatctcaatatttacaatttaacaataattgaaagcattcgtgaagaagattttacttattctaaaacgacattgaaagcattgacaatagaacatatcacgaaccaagtttttctgttttcacagacagctttgtacaccgtgttttctgagatgaacattatgatgttaaccatttcagatacaccttttatacacatgctgtgtcctcatgcaccaagcacattcaagtttttgaactttacccagaacgttttcacagatagtatttttgaaaaatgttccacgttagttaaattggagacacttatcttacaaaagaatggattaaaagaccttttcaaagtaggtctcatgacgaaggatatgccttctttggaaatactggatgttagctggaattctttggaatctggtagacataaggaaaactgcacttgggttgagagtatagtggtgttaaatttgtcttcaaatatgcttactgactctgttttcagatgtttacctcccaggatcaaggtacttgatcttcacagcaataaaataaagagcattcctaaacaagtcgtaaaactggaagctttgcaagaactcaatgttgctttcaattctttaactgaccttcctggatgtggcagctttagcagcctttctgtattgatcattgatcacaattcagtttcccacccatcggctgatttcttccagagctgccagaagatgaggtcaataaaagcaggggacaatccattccaatgtacctgtgagctaagagaatttgtcaaaaatatagaccaagtatcaagtgaagtgttagagggctggcctgattcttataagtgtgactacccagaaagttatagaggaagcccactaaaggactttcacatgtctgaattatcctgcaacataactctgctgatcgtcaccatcggtgccaccatgctggtgttggctgtgactgtgacctccctctgcatctacttggatctgccctggtatctcaggatggtgtgccagtggacccagactcggcgcagggccaggaacatacccttagaagaactccaaagaaacctccagtttcatgcttttatttcatatagtgaacatgattctgcctgggtgaaaagtgaattggtaccttacctagaaaaagaagatatacagatttgtcttcatgagagaaactttgtccctggcaagagcattgtggaaaatatcatcaactgcattgagaagagttacaagtccatctttgttttgtctcccaactttgtccagagtgagtggtgccattacgaactctattttgcccatcacaatctctttcatgaaggatctaataacttaatcctcatcttactggaacccattctacagaacagcattcccaacaagtaccacaagctgaaggctctcatgatgcagcggacttatttgcagtggcccaaggagaaaagcaaacgtgggctcttttgggctaacattagagccgcttttaatatgaaattaacactagtcactgaaaacaatgatgtgaaatcttaa

SEQ ID NO: 9727 - RNA, 2391 nt, synthetic construct
  misc_feature 1..2391: note = derived and/or modified sequence opt1 fromTLR6__Homo_sapiens__AAY88758
  source 1..2391: mol_type = other RNA
atgaccaaggacaaggagcccatcgtcaagagcttccacttcgtgtgcctgatgatcatcatcgtgggcacccgcatccagttctccgacgggaacgagttcgccgtggacaagagcaagcggggcctcatccacgtcccgaaggacctgcccctgaagacgaaggtgctcgacatgtcccagaactacatcgccgagctccaggtgagcgacatgtccttcctgagcgagctgaccgtcctgcgcctgtcccacaaccggatccagctcctggacctgagcgtgttcaagttcaaccaggacctcgagtacctggacctgtcccacaaccagctccagaagatcagctgccaccccatcgtgtccttccgccacctggacctgagcttcaacgacttcaaggcgctccccatctgcaaggagttcgggaacctgtcccagctgaacttcctcggcctgagcgccatgaagctgcagaagctcgacctgctgccgatcgcccacctccacctgtcctacatcctgctcgacctgcggaactactacatcaaggagaacgagaccgagagcctgcagatcctcaacgccaagaccctgcacctggtcttccaccccacgtccctcttcgccatccaggtgaacatcagcgtgaacaccctggggtgcctgcagctcaccaacatcaagctgaacgacgacaactgccaggtcttcatcaagttcctgtccgagctcacccgcggccccacgctgctgaacttcaccctcaaccacatcgagaccacctggaagtgcctggtgcgggtgttccagttcctgtggcccaagccggtcgagtacctcaacatctacaacctgacgatcatcgagagcatccgcgaggaggacttcacctacagcaagaccaccctgaaggcgctgacgatcgagcacatcaccaaccaggtgttcctcttctcccagaccgccctgtacaccgtgttcagcgagatgaacatcatgatgctgacgatctccgacacccccttcatccacatgctctgcccccacgcccccagcaccttcaagttcctgaacttcacccagaacgtcttcacggactccatcttcgagaagtgcagcaccctggtgaagctcgagaccctgatcctgcagaagaacggcctcaaggacctgttcaaggtggggctgatgaccaaggacatgccgtccctcgagatcctggacgtcagctggaactccctggagagcggccggcacaaggagaactgcacgtgggtggagtccatcgtggtcctcaacctgagctccaacatgctgaccgacagcgtgttccgctgcctcccgccccggatcaaggtcctggacctgcactccaacaagatcaagagcatccccaagcaggtcgtgaagctcgaggccctgcaggagctgaacgtggcgttcaactccctcaccgacctgcccgggtgcggcagcttctccagcctgagcgtgctcatcatcgaccacaactccgtgagccacccctccgccgacttcttccagagctgccagaagatgcgctccatcaaggccggggacaaccccttccagtgcacgtgcgagctgcgggagttcgtcaagaacatcgaccaggtgagctccgaggtgctggagggctggcccgacagctacaagtgcgactacccggagtcctaccgcggcagccccctcaaggacttccacatgtccgagctgagctgcaacatcaccctgctcatcgtcaccatcggggccaccatgctggtgctggccgtgaccgtcacgtccctctgcatctacctggacctgccctggtacctccggatggtgtgccagtggacccagacccgccggcgcgcgcggaacatccccctggaggagctgcagcgcaacctccagttccacgccttcatcagctactccgagcacgacagcgcctgggtgaagtccgagctggtcccgtacctggagaaggaggacatccagatctgcctccacgagcggaacttcgtgcccggcaagagcatcgtggagaacatcatcaactgcatcgagaagtcctacaagagcatcttcgtcctgagccccaacttcgtgcagtccgagtggtgccactacgagctgtacttcgcccaccacaacctcttccacgaggggagcaacaacctgatcctgatcctcctggagcccatcctgcagaactccatcccgaacaagtaccacaagctcaaggccctgatgatgcagcgcacctacctgcagtggcccaaggagaagtccaagcgcggcctcttctgggcgaacatccgggccgccttcaacatgaagctgaccctggtgacggagaacaacgacgtcaagagctga

SEQ ID NO: 9728 - RNA, 2391 nt, synthetic construct
  misc_feature 1..2391: note = derived and/or modified sequence opt2 fromTLR6__Homo_sapiens__AAY88758
  source 1..2391: mol_type = other RNA
atgaccaaggacaaggagcccatcgtcaagtccttccacttcgtctgcctcatgatcatcatcgtcggcacccgcatccagttctccgacggcaacgagttcgccgtcgacaagtccaagcgcggcctcatccacgtccccaaggacctccccctcaagaccaaggtcctcgacatgtcccagaactacatcgccgagctccaggtctccgacatgtccttcctctccgagctcaccgtcctccgcctctcccacaaccgcatccagctcctcgacctctccgtcttcaagttcaaccaggacctcgagtacctcgacctctcccacaaccagctccagaagatctcctgccaccccatcgtctccttccgccacctcgacctctccttcaacgacttcaaggccctccccatctgcaaggagttcggcaacctctcccagctcaacttcctcggcctctccgccatgaagctccagaagctcgacctcctccccatcgcccacctccacctctcctacatcctcctcgacctccgcaactactacatcaaggagaacgagaccgagtccctccagatcctcaacgccaagaccctccacctcgtcttccaccccacctccctcttcgccatccaggtcaacatctccgtcaacaccctcggctgcctccagctcaccaacatcaagctcaacgacgacaactgccaggtcttcatcaagttcctctccgagctcacccgcggccccaccctcctcaacttcaccctcaaccacatcgagaccacctggaagtgcctcgtccgcgtcttccagttcctctggcccaagcccgtcgagtacctcaacatctacaacctcaccatcatcgagtccatccgcgaggaggacttcacctactccaagaccaccctcaaggccctcaccatcgagcacatcaccaaccaggtcttcctcttctcccagaccgccctctacaccgtcttctccgagatgaacatcatgatgctcaccatctccgacacccccttcatccacatgctctgcccccacgccccctccaccttcaagttcctcaacttcacccagaacgtcttcaccgactccatcttcgagaagtgctccaccctcgtcaagctcgagaccctcatcctccagaagaacggcctcaaggacctcttcaaggtcggcctcatgaccaaggacatgccctccctcgagatcctcgacgtctcctggaactccctcgagtccggccgccacaaggagaactgcacctgggtcgagtccatcgtcgtcctcaacctctcctccaacatgctcaccgactccgtcttccgctgcctccccccccgcatcaaggtcctcgacctccactccaacaagatcaagtccatccccaagcaggtcgtcaagctcgaggccctccaggagctcaacgtcgccttcaactccctcaccgacctccccggctgcggctccttctcctccctctccgtcctcatcatcgaccacaactccgtctcccacccctccgccgacttcttccagtcctgccagaagatgcgctccatcaaggccggcgacaaccccttccagtgcacctgcgagctccgcgagttcgtcaagaacatcgaccaggtctcctccgaggtcctcgagggctggcccgactcctacaagtgcgactaccccgagtcctaccgcggctcccccctcaaggacttccacatgtccgagctctcctgcaacatcaccctcctcatcgtcaccatcggcgccaccatgctcgtcctcgccgtcaccgtcacctccctctgcatctacctcgacctcccctggtacctccgcatggtctgccagtggacccagacccgccgccgcgcccgcaacatccccctcgaggagctccagcgcaacctccagttccacgccttcatctcctactccgagcacgactccgcctgggtcaagtccgagctcgtcccctacctcgagaaggaggacatccagatctgcctccacgagcgcaacttcgtccccggcaagtccatcgtcgagaacatcatcaactgcatcgagaagtcctacaagtccatcttcgtcctctcccccaacttcgtccagtccgagtggtgccactacgagctctacttcgcccaccacaacctcttccacgagggctccaacaacctcatcctcatcctcctcgagcccatcctccagaactccatccccaacaagtaccacaagctcaaggccctcatgatgcagcgcacctacctccagtggcccaaggagaagtccaagcgcggcctcttctgggccaacatccgcgccgccttcaacatgaagctcaccctcgtcaccgagaacaacgacgtcaagtcctga

SEQ ID NO: 9729 - RNA, 2391 nt, synthetic construct
  misc_feature 1..2391: note = derived and/or modified sequence opt3 fromTLR6__Homo_sapiens__AAY88758
  source 1..2391: mol_type = other RNA
atgaccaaggacaaagagcccatcgtcaagagcttccactttgtgtgcctgatgattataatcgttggcacaaggattcagttctccgatgggaacgaatttgccgtggacaaatctaagagaggactcatccatgtacctaaagatcttccactgaagactaaggtgttggacatgtcacaaaattacattgctgagttacaggtcagtgatatgagcttcctgtccgaactaacggtgctccggctgtctcacaaccgcatccagcttctggacttgtcggtttttaaattcaatcaggatctcgagtatctggacctgtcacataaccaactccagaagataagctgtcacccgatcgtgagttttcgacatttagatctgtccttcaatgactttaaagcacttcccatttgcaaggagttcggtaacttgtctcagctgaattttctaggcctcagcgccatgaaactgcagaaacttgatctgttgcctatcgcgcacctccacctgtcctacattttactggacctccgtaactattacatcaaggaaaatgagaccgaatcacttcaaatactgaacgctaaaacattgcatctagtcttccacccaacttccctgtttgccattcaggtgaatatcagcgtaaacaccctcgggtgtctgcagcttacaaatattaagctgaacgatgacaattgccaggttttcatcaaattcttgtctgagctcaccagaggacccactctgttaaactttacactgaaccatatcgaaaccacgtggaagtgtctagtgagggtcttccaatttctctggcctaaaccagtggagtatctgaatatttacaaccttactataatcgagtccattcgggaagaggacttcacctattcaaagacaactttgaaagcactgaccatcgaacacataacaaatcaggtgtttctcttcagccagaccgccctgtacacggtctttagtgagatgaacattatgatgcttactatctctgatacacccttcatccacatgctgtgccctcatgctccatccacctttaagttcttgaattttactcaaaacgttttcacagacagcatttttgaaaagtgttcgaccctcgtgaaactggagacgttaatcctgcagaagaatggcctaaaagatctcttcaaggtaggtctgatgaccaaagacatgccgtctcttgagattttggatgtgtcctggaactcactggaaagtgggcgccacaaggagaattgcacatgggtcgaaagcatagtggttctcaacctgtcctctaatatgttaactgacagcgtgttcagatgtctgccccctaggatcaaggtccttgatttgcattcaaacaaaattaagagtatcccaaaacaggtggtaaagctcgaggcactgcaggaactaaatgttgcctttaactccctgaccgacctccccggatgcggcagcttctcttcactgagtgtgcttatcattgatcacaatagcgtctcccatccttctgctgactttttccaatcgtgtcagaaaatgcggagcataaaggccggcgataacccatttcagtgcacatgcgagttgcgcgagttcgtgaagaacatcgaccaggtctcctcagaagtgctggaggggtggcccgacagttacaaatgtgattatccggaatcttaccgaggaagccctttaaaggactttcacatgtccgagctctcatgcaatattactctgcttatcgttaccattggtgcgacaatgctggtgttggcagtaaccgtcactagcctctgtatctatctggatctaccctggtacctgagaatggtgtgccaatggacgcagacaaggcggcgtgcccgcaacataccactcgaggaactgcagagaaatcttcagttccacgcttttatctcttattccgagcatgacagtgcctgggttaaaagcgaattggtgccttacctggagaaggaagatattcaaatctgtttacacgagaggaacttcgtccccggcaaatctattgtggagaatatcataaactgcattgaaaagtcctataagtcaatctttgtactcagtccaaatttcgtgcagagcgagtggtgtcattacgaactgtactttgcacaccacaaccttttccatgaggggtcgaataacctgattctaatcctcctggaacccatattgcagaatagtatccctaacaaatatcacaagctgaaggctttaatgatgcagcggacctacctccaatggccaaaggagaaatctaagcgaggactgttctgggccaatattcgcgcggcctttaacatgaaacttactctggttaccgagaataacgacgtcaagagctga

SEQ ID NO: 9730 - RNA, 2391 nt, synthetic construct
  misc_feature 1..2391: note = derived and/or modified sequence opt4 fromTLR6__Homo_sapiens__AAY88758
  source 1..2391: mol_type = other RNA
atgaccaaggacaaggagcccatcgtgaagagcttccacttcgtgtgcctgatgatcatcatcgtgggcaccagaatccagttcagcgacggcaacgagttcgccgtggacaagagcaagagaggcctgatccacgtgcccaaggacctgcccctgaagaccaaggtgctggacatgagccagaactacatcgccgagctgcaggtgagcgacatgagcttcctgagcgagctgaccgtgctgagactgagccacaacagaatccagctgctggacctgagcgtgttcaagttcaaccaggacctggagtacctggacctgagccacaaccagctgcagaagatcagctgccaccccatcgtgagcttcagacacctggacctgagcttcaacgacttcaaggccctgcccatctgcaaggagttcggcaacctgagccagctgaacttcctgggcctgagcgccatgaagctgcagaagctggacctgctgcccatcgcccacctgcacctgagctacatcctgctggacctgagaaactactacatcaaggagaacgagaccgagagcctgcagatcctgaacgccaagaccctgcacctggtgttccaccccaccagcctgttcgccatccaggtgaacatcagcgtgaacaccctgggctgcctgcagctgaccaacatcaagctgaacgacgacaactgccaggtgttcatcaagttcctgagcgagctgaccagaggccccaccctgctgaacttcaccctgaaccacatcgagaccacctggaagtgcctggtgagagtgttccagttcctgtggcccaagcccgtggagtacctgaacatctacaacctgaccatcatcgagagcatcagagaggaggacttcacctacagcaagaccaccctgaaggccctgaccatcgagcacatcaccaaccaggtgttcctgttcagccagaccgccctgtacaccgtgttcagcgagatgaacatcatgatgctgaccatcagcgacacccccttcatccacatgctgtgcccccacgcccccagcaccttcaagttcctgaacttcacccagaacgtgttcaccgacagcatcttcgagaagtgcagcaccctggtgaagctggagaccctgatcctgcagaagaacggcctgaaggacctgttcaaggtgggcctgatgaccaaggacatgcccagcctggagatcctggacgtgagctggaacagcctggagagcggcagacacaaggagaactgcacctgggtggagagcatcgtggtgctgaacctgagcagcaacatgctgaccgacagcgtgttcagatgcctgccccccagaatcaaggtgctggacctgcacagcaacaagatcaagagcatccccaagcaggtggtgaagctggaggccctgcaggagctgaacgtggccttcaacagcctgaccgacctgcccggctgcggcagcttcagcagcctgagcgtgctgatcatcgaccacaacagcgtgagccaccccagcgccgacttcttccagagctgccagaagatgagaagcatcaaggccggcgacaaccccttccagtgcacctgcgagctgagagagttcgtgaagaacatcgaccaggtgagcagcgaggtgctggagggctggcccgacagctacaagtgcgactaccccgagagctacagaggcagccccctgaaggacttccacatgagcgagctgagctgcaacatcaccctgctgatcgtgaccatcggcgccaccatgctggtgctggccgtgaccgtgaccagcctgtgcatctacctggacctgccctggtacctgagaatggtgtgccagtggacccagaccagaagaagagccagaaacatccccctggaggagctgcagagaaacctgcagttccacgccttcatcagctacagcgagcacgacagcgcctgggtgaagagcgagctggtgccctacctggagaaggaggacatccagatctgcctgcacgagagaaacttcgtgcccggcaagagcatcgtggagaacatcatcaactgcatcgagaagagctacaagagcatcttcgtgctgagccccaacttcgtgcagagcgagtggtgccactacgagctgtacttcgcccaccacaacctgttccacgagggcagcaacaacctgatcctgatcctgctggagcccatcctgcagaacagcatccccaacaagtaccacaagctgaaggccctgatgatgcagagaacctacctgcagtggcccaaggagaagagcaagagaggcctgttctgggccaacatcagagccgccttcaacatgaagctgaccctggtgaccgagaacaacgacgtgaagagctga

SEQ ID NO: 9731 - RNA, 2391 nt, synthetic construct
  misc_feature 1..2391: note = derived and/or modified sequence opt5 fromTLR6__Homo_sapiens__AAY88758
  source 1..2391: mol_type = other RNA
atgaccaaggacaaagagcccatcgtgaagtccttccactttgtgtgcctgatgattatcattgttggcacaagaatccagttctccgatgggaacgaatttgccgtggacaaatctaagcggggactcattcatgtgcctaaagatctgccgcttaagacgaaggtcctggacatgagccaaaattacatcgctgagctccaggtgtccgatatgtctttcctgagcgaacttaccgttctgcgcctctcccacaacagaatccagctgctggacctctctgtgtttaaattcaatcaggatctggagtatcttgacctgagccataaccaactccagaagatttcctgtcaccccatcgtcagctttcggcatctggatctttctttcaatgactttaaagccctgcctatttgcaaggagttcggcaacctctcccagctgaattttctggggctcagcgcgatgaaactgcagaagctcgatctgctccccatcgctcatctgcacctttcttacattctgctcgacctgcgcaactattacatcaaggaaaatgagacagaatccctgcaaattctcaacgccaaaaccctgcaccttgtgttccaccctacaagcctgtttgccatccaggttaatatctctgtgaacaccctcggatgtctgcagcttacaaatattaagctgaacgatgacaattgccaggtcttcatcaaattcctctccgagctgaccagaggccccacgctgctcaactttaccctgaaccatattgaaacaacctggaagtgtcttgtgcgggtgttccaatttctgtggcctaaaccggtcgagtatctcaatatctacaacctgacaattatcgagagcatccgcgaagaggacttcacctattccaagacgacactgaaagctcttaccattgaacacatcacaaatcaggtttttctcttctctcagaccgccctgtacaccgtgtttagcgagatgaacattatgatgctgacaatctccgatacgcccttcattcacatgctctgccctcatgctcccagcacctttaagttcctgaattttacacaaaacgtgttcaccgactctatctttgaaaagtgttccacacttgtcaaactggagaccctcatcctgcagaagaatgggctgaaagatcttttcaaggtgggactcatgacgaaagacatgcctagcctggagattctggatgtttcttggaacagcctcgaatccggcagacacaaggagaattgcacatgggtggaatctatcgtcgtgctgaaccttagctccaatatgctgaccgacagcgttttccggtgtcttcccccgcgcattaaggtgctggatctgcattctaacaaaatcaagtccattcctaaacaggtcgtgaaacttgaggccctccaggaactgaatgtcgcgtttaacagcctgaccgacctccccggctgcgggtctttctccagcctgtccgtgcttatcattgatcacaattctgttagccatccttccgccgactttttccaatcttgtcagaagatgagaagcatcaaggctggagataacccctttcagtgcacatgcgagctgcgggagttcgtgaagaacatcgaccaggtctccagcgaagtgctcgagggctggcccgactcttacaaatgtgattatcctgaatcctaccgcgggagcccgctgaaggactttcacatgtctgagctgtcctgcaatattacccttctcatcgttacaattggagccacgatgctggtgctggctgtcaccgtgacaagcctctgtatctatctggatcttccctggtacctgagaatggtgtgccaatggacccagacacggcgcagagcccggaacattcctctcgaggaactgcagagaaatctgcagttccacgcgtttatctcttatagcgagcatgactccgcctgggttaaaagcgaacttgtcccctacctggagaaggaagatatccaaatttgtctccacgagcgcaacttcgtgcctggcaaatctatcgtggagaatattatcaactgcattgaaaagtcctataagagcatctttgtcctgtcccccaatttcgtgcagtctgagtggtgtcattacgaactctactttgctcaccacaacctgttccatgaggggagcaataaccttatcctgattctcctggaaccgatcctgcagaatagcattcctaacaaatatcacaaacttaaggccctgatgatgcagcggacctacctccaatggcccaaggagaaatctaagagaggactgttctgggctaatatccgcgccgcctttaacatgaaactcacgctggttaccgagaataacgacgtcaagagctga

SEQ ID NO: 9732 - protein, 796 aa, synthetic construct [sequence omitted]

SEQ ID NO: 9733 - RNA, 2391 nt, synthetic construct
  misc_feature 1..2391: note = TLR6__Homo_sapiens__AAY88759
  source 1..2391: mol_type = other RNA
atgaccaaagacaaagaacctattgttaaaagcttccattttgtttgccttatgatcataatagttggaaccagaatccagttctccgacggaaatgaatttgcagtagacaagtcaaaaagaggtcttattcatgttccaaaagacctaccgctgaaaaccaaagtcttagatatgtctcagaactacatcgctgagcttcaggtctctgacatgagctttctatcagagttgacagttttgagactttcccataacagaatccagctacttgatttaagtgttttcaagttcaaccaggatttagaatatttggatttatctcataatcagttgcaaaagatatcctgccatcctattgtgagtttcaggcatttagatctctcattcaatgatttcaaggccctgcccatctgtaaggaatttggcaacttatcacaactgaatttcttgggattgagtgctatgaagctgcaaaaattagatttgctgccaattgctcacttgcatctaagttatatccttctggatttaagaaattattatataaaagaaaatgagacagaaagtctacaaattctgaatgcaaaaacccttcaccttgtttttcacccaactagtttattcgctatccaagtgaacatatcagttaatactttagggtgcttacaactgactaatattaaattgaatgatgacaactgtcaagttttcattaaatttttatcagaactcaccagaggtccaaccttactgaattttaccctcaaccacatagaaacgacttggaaatgcctggtcagagtctttcaatttctttggcccaaacctgtggaatatctcaatatttacaatttaacaataattgaaagcattcgtgaagaagattttacttattctaaaacgacattgaaagcattgacaatagaacatatcacgaaccaagtttttctgttttcacagacagctttgtacaccgtgttttctgagatgaacattatgatgttaaccatttcagatacaccttttatacacatgctgtgtcctcatgcaccaagcacattcaagtttttgaactttacccagaacgttttcacagatagtatttttgaaaaatgttccacgttagttaaattggagacacttatcttacaaaagaatggattaaaagaccttttcaaagtaggtctcatgacgaaggatatgccttctttggaaatactggatgttagctggaattctttggaatctggtagacataaagaaaactgcacttgggttgagagtatagtggtgttaaatttgtcttcaaatatgcttactgactctgttttcagatgtttacctcccaggatcaaggtacttgatcttcacagcaataaaataaagagcgttcctaaacaagtcgtaaaactggaagctttgcaagaactcaatgttgctttcaattctttaactgaccttcctggatgtggcagctttagcagcctttctgtattgatcattgatcacaattcagtttcccacccatcggctgatttcttccagagctgccagaagatgaggtcaataaaagcaggggacaatccattccaatgtacctgtgagctaagagaatttgtcaaaaatatagaccaagtatcaagtgaagtgttagagggctggcctgattcttataagtgtgactacccagaaagttatagaggaagcccactaaaggactttcacatgtctgaattatcctgcaacataactctgctgatcgtcaccatcggtgccaccatgctggtgttggctgtgactgtgacctccctctgcatctacttggatctgccctggtatctcaggatggtgtgccagtggacccagactcggcgcagggccaggaacatacccttagaagaactccaaagaaacctccagtttcatgcttttatttcatatagtgaacatgattctgcctgggtgaaaagtgaattggtaccttacctagaaaaagaagatatacagatttgtcttcatgagagaaactttgtccctggcaagagcattgtggaaaatatcatcaactgcattgagaagagttacaagtccatctttgttttgtctcccaactttgtccagagtgagtggtgccattacgaactctattttgcccatcacaatctctttcatgaaggatctaataacttaatcctcatcttactggaacccattccacagaacagcattcccaacaagtaccacaagctgaaggctctcatgatgcagcggacttatttgcagtggcccaaggagaaaagcaaacgtgggctcttttgggctaacattagagccgcttttaatatgaaattaacactagtcactgaaaacaatgatgtgaaatcttaa

SEQ ID NO: 9734 - RNA, 2391 nt, synthetic construct
  misc_feature 1..2391: note = derived and/or modified sequence opt1 fromTLR6__Homo_sapiens__AAY88759
  source 1..2391: mol_type = other RNA
atgaccaaggacaaggagcccatcgtcaagagcttccacttcgtgtgcctgatgatcatcatcgtgggcacccgcatccagttcagcgacgggaacgagttcgccgtggacaagagcaagcggggcctcatccacgtcccgaaggacctgcccctgaagacgaaggtgctcgacatgtcccagaactacatcgccgagctccaggtgagcgacatgtccttcctgagcgagctgaccgtcctgcgcctgtcccacaaccggatccagctcctggacctgagcgtgttcaagttcaaccaggacctcgagtacctggacctgtcccacaaccagctccagaagatcagctgccaccccatcgtgtccttccgccacctggacctgagcttcaacgacttcaaggcgctccccatctgcaaggagttcgggaacctgtcccagctgaacttcctcggcctgagcgccatgaagctgcagaagctcgacctgctgccgatcgcccacctccacctgtcctacatcctgctcgacctgcggaactactacatcaaggagaacgagaccgagagcctgcagatcctcaacgccaagaccctgcacctggtcttccaccccacgtccctcttcgccatccaggtgaacatcagcgtgaacaccctggggtgcctgcagctcaccaacatcaagctgaacgacgacaactgccaggtcttcatcaagttcctgtccgagctcacccgcggccccacgctgctgaacttcaccctcaaccacatcgagaccacctggaagtgcctggtgcgggtgttccagttcctgtggcccaagccggtcgagtacctcaacatctacaacctgacgatcatcgagagcatccgcgaggaggacttcacctacagcaagaccaccctgaaggcgctgacgatcgagcacatcaccaaccaggtgttcctcttctcccagaccgccctgtacaccgtgttcagcgagatgaacatcatgatgctgacgatctccgacacccccttcatccacatgctctgcccccacgcccccagcaccttcaagttcctgaacttcacccagaacgtcttcacggactccatcttcgagaagtgcagcaccctggtgaagctcgagaccctgatcctgcagaagaacggcctcaaggacctgttcaaggtggggctgatgaccaaggacatgccgtccctcgagatcctggacgtcagctggaactccctggagagcggccggcacaaggagaactgcacgtgggtggagtccatcgtggtcctcaacctgagctccaacatgctgaccgacagcgtgttccgctgcctcccgccccggatcaaggtcctggacctgcactccaacaagatcaagagcgtgcccaagcaggtcgtgaagctcgaggccctgcaggagctgaacgtggcgttcaactccctcaccgacctgcccgggtgcggcagcttctccagcctgagcgtgctcatcatcgaccacaactccgtcagccacccctccgccgacttcttccagagctgccagaagatgcgctccatcaaggccggggacaaccccttccagtgcacgtgcgagctgcgggagttcgtgaagaacatcgaccaggtgagctccgaggtcctggagggctggcccgacagctacaagtgcgactacccggagtcctaccgcggcagccccctcaaggacttccacatgtccgagctgagctgcaacatcaccctgctcatcgtgaccatcggggccaccatgctggtgctggccgtcaccgtgacgtccctctgcatctacctggacctgccctggtacctccggatggtgtgccagtggacccagacccgccggcgcgcgcggaacatccccctggaggagctgcagcgcaacctccagttccacgccttcatcagctactccgagcacgacagcgcctgggtcaagtccgagctggtgccgtacctggagaaggaggacatccagatctgcctccacgagcggaacttcgtgcccggcaagagcatcgtcgagaacatcatcaactgcatcgagaagtcctacaagagcatcttcgtgctgagccccaacttcgtgcagtccgagtggtgccactacgagctgtacttcgcccaccacaacctcttccacgaggggagcaacaacctgatcctgatcctcctggagcccatcccgcagaactccatccccaacaagtaccacaagctgaaggccctcatgatgcagcgcacctacctgcagtggcccaaggagaagtccaagcgcggcctgttctgggcgaacatccgggccgccttcaacatgaagctcaccctggtcacggagaacaacgacgtgaagtcctga

SEQ ID NO: 9735 - RNA, 2391 nt, synthetic construct
  misc_feature 1..2391: note = derived and/or modified sequence opt2 fromTLR6__Homo_sapiens__AAY88759
  source 1..2391: mol_type = other RNA
atgaccaaggacaaggagcccatcgtcaagtccttccacttcgtctgcctcatgatcatcatcgtcggcacccgcatccagttctccgacggcaacgagttcgccgtcgacaagtccaagcgcggcctcatccacgtccccaaggacctccccctcaagaccaaggtcctcgacatgtcccagaactacatcgccgagctccaggtctccgacatgtccttcctctccgagctcaccgtcctccgcctctcccacaaccgcatccagctcctcgacctctccgtcttcaagttcaaccaggacctcgagtacctcgacctctcccacaaccagctccagaagatctcctgccaccccatcgtctccttccgccacctcgacctctccttcaacgacttcaaggccctccccatctgcaaggagttcggcaacctctcccagctcaacttcctcggcctctccgccatgaagctccagaagctcgacctcctccccatcgcccacctccacctctcctacatcctcctcgacctccgcaactactacatcaaggagaacgagaccgagtccctccagatcctcaacgccaagaccctccacctcgtcttccaccccacctccctcttcgccatccaggtcaacatctccgtcaacaccctcggctgcctccagctcaccaacatcaagctcaacgacgacaactgccaggtcttcatcaagttcctctccgagctcacccgcggccccaccctcctcaacttcaccctcaaccacatcgagaccacctggaagtgcctcgtccgcgtcttccagttcctctggcccaagcccgtcgagtacctcaacatctacaacctcaccatcatcgagtccatccgcgaggaggacttcacctactccaagaccaccctcaaggccctcaccatcgagcacatcaccaaccaggtcttcctcttctcccagaccgccctctacaccgtcttctccgagatgaacatcatgatgctcaccatctccgacacccccttcatccacatgctctgcccccacgccccctccaccttcaagttcctcaacttcacccagaacgtcttcaccgactccatcttcgagaagtgctccaccctcgtcaagctcgagaccctcatcctccagaagaacggcctcaaggacctcttcaaggtcggcctcatgaccaaggacatgccctccctcgagatcctcgacgtctcctggaactccctcgagtccggccgccacaaggagaactgcacctgggtcgagtccatcgtcgtcctcaacctctcctccaacatgctcaccgactccgtcttccgctgcctccccccccgcatcaaggtcctcgacctccactccaacaagatcaagtccgtccccaagcaggtcgtcaagctcgaggccctccaggagctcaacgtcgccttcaactccctcaccgacctccccggctgcggctccttctcctccctctccgtcctcatcatcgaccacaactccgtctcccacccctccgccgacttcttccagtcctgccagaagatgcgctccatcaaggccggcgacaaccccttccagtgcacctgcgagctccgcgagttcgtcaagaacatcgaccaggtctcctccgaggtcctcgagggctggcccgactcctacaagtgcgactaccccgagtcctaccgcggctcccccctcaaggacttccacatgtccgagctctcctgcaacatcaccctcctcatcgtcaccatcggcgccaccatgctcgtcctcgccgtcaccgtcacctccctctgcatctacctcgacctcccctggtacctccgcatggtctgccagtggacccagacccgccgccgcgcccgcaacatccccctcgaggagctccagcgcaacctccagttccacgccttcatctcctactccgagcacgactccgcctgggtcaagtccgagctcgtcccctacctcgagaaggaggacatccagatctgcctccacgagcgcaacttcgtccccggcaagtccatcgtcgagaacatcatcaactgcatcgagaagtcctacaagtccatcttcgtcctctcccccaacttcgtccagtccgagtggtgccactacgagctctacttcgcccaccacaacctcttccacgagggctccaacaacctcatcctcatcctcctcgagcccatcccccagaactccatccccaacaagtaccacaagctcaaggccctcatgatgcagcgcacctacctccagtggcccaaggagaagtccaagcgcggcctcttctgggccaacatccgcgccgccttcaacatgaagctcaccctcgtcaccgagaacaacgacgtcaagtcctga

SEQ ID NO: 9736 - RNA, 2391 nt, synthetic construct
  misc_feature 1..2391: note = derived and/or modified sequence opt3 fromTLR6__Homo_sapiens__AAY88759
  source 1..2391: mol_type = other RNA
atgaccaaggacaaagagcccatcgtcaagagcttccactttgtgtgcctgatgattataatcgtgggcacaaggattcagttctccgatgggaacgaatttgccgtggacaaatctaagagaggactcatccatgtacctaaagatcttccactgaagactaaggtgttggacatgtcacaaaattacattgctgagttacaggtcagtgatatgagcttcctgtccgaactaacggtgctccggctgtctcacaaccgcatccagcttctggacttgtcggtttttaaattcaatcaggatctcgagtatctggacctgtcacataaccaactccagaagataagctgtcacccgatcgtgagttttcgacatttagatctgtccttcaatgactttaaagcacttcccatttgcaaggagttcggtaacttgtctcagctgaattttctaggcctcagcgccatgaaactgcagaaacttgatctgttgcctatcgcgcacctccacctgtcctacattttactggacctccgtaactattacatcaaggagaatgagaccgaatcacttcaaatactgaacgctaagacattgcatctagtcttccacccaacttccctgtttgccattcaggtgaatatcagcgtaaacaccctcgggtgtctgcagcttacaaatattaagctgaacgatgacaattgccaggttttcatcaaattcttgtctgagctcaccagaggacccactctgttaaactttacactgaaccatatcgaaaccacgtggaagtgtctagtgagggtcttccaatttctctggcctaaaccagtggagtatctgaatatttacaaccttactataatcgagtccattcgggaagaggacttcacctattcaaagacaactttgaaagcactgaccatcgaacacataacaaatcaggtgtttctcttcagccagaccgccctgtacacggtctttagtgagatgaacattatgatgcttactatctctgatacacccttcatccacatgctgtgccctcatgctccatccacctttaagttcttgaattttactcaaaacgttttcacagacagcatttttgaaaagtgttcgaccctcgtgaaactggagacgttaatcctgcagaagaatggcctaaaagatctcttcaaggtaggtctgatgaccaaagacatgccgtctcttgagattttggatgtgtcctggaactcactggaaagtgggcgccacaaggagaattgcacatgggtcgaaagcatagtggttctcaacctgtcctctaatatgttaactgacagcgtgttcagatgtctgccccctaggatcaaggtccttgatttgcattcaaacaaaattaagagtgtgccaaaacaggtagttaagctcgaggcactgcaggaactaaatgtggcctttaactccctgaccgacctccccggatgcggcagcttctcttcactgagtgtccttatcatcgatcacaatagcgtgtcccatccttctgctgactttttccaatcgtgtcagaaaatgcggagcattaaggccggcgataacccatttcagtgcacatgcgagttgcgcgagttcgtcaagaacatagaccaggtgtcctcagaagttctggaggggtggcccgacagttacaaatgtgattatccggaatcttaccgaggaagccctttaaaggactttcacatgtccgagctctcatgcaatatcactctgcttattgtgaccatcggtgcgacaatgctggtattggcagtcaccgtgactagcctctgtatttatctggatctaccctggtacctgagaatggtttgccaatggacgcagacaaggcggcgtgcccgcaacatcccactcgaagaactgcagagaaatcttcagttccacgcttttatatcttattccgagcatgacagtgcctgggtgaaaagcgaattggtcccttacctggagaaggaagatatccaaatttgtttacacgagaggaacttcgtgcccggcaaatctatcgtagagaatattatcaactgcatagaaaagtcctataagtcaatttttgtgctcagtccaaatttcgttcagagcgagtggtgtcattacgaactgtactttgcacaccacaaccttttccatgaggggtcgaataacctgatcctaattctcctggaacccatccctcagaatagtataccaaacaaatatcacaagttgaaagctctgatgatgcagcggacctacttacaatggccgaaggagaaatctaagcgaggactcttctgggccaatatccgcgcggcctttaacatgaaactgactcttgtcaccgagaataacgacgttaagagctga

SEQ ID NO: 9737 - RNA, 2391 nt, synthetic construct
  misc_feature 1..2391: note = derived and/or modified sequence opt4 fromTLR6__Homo_sapiens__AAY88759
  source 1..2391: mol_type = other RNA
atgaccaaggacaaggagcccatcgtgaagagcttccacttcgtgtgcctgatgatcatcatcgtgggcaccagaatccagttcagcgacggcaacgagttcgccgtggacaagagcaagagaggcctgatccacgtgcccaaggacctgcccctgaagaccaaggtgctggacatgagccagaactacatcgccgagctgcaggtgagcgacatgagcttcctgagcgagctgaccgtgctgagactgagccacaacagaatccagctgctggacctgagcgtgttcaagttcaaccaggacctggagtacctggacctgagccacaaccagctgcagaagatcagctgccaccccatcgtgagcttcagacacctggacctgagcttcaacgacttcaaggccctgcccatctgcaaggagttcggcaacctgagccagctgaacttcctgggcctgagcgccatgaagctgcagaagctggacctgctgcccatcgcccacctgcacctgagctacatcctgctggacctgagaaactactacatcaaggagaacgagaccgagagcctgcagatcctgaacgccaagaccctgcacctggtgttccaccccaccagcctgttcgccatccaggtgaacatcagcgtgaacaccctgggctgcctgcagctgaccaacatcaagctgaacgacgacaactgccaggtgttcatcaagttcctgagcgagctgaccagaggccccaccctgctgaacttcaccctgaaccacatcgagaccacctggaagtgcctggtgagagtgttccagttcctgtggcccaagcccgtggagtacctgaacatctacaacctgaccatcatcgagagcatcagagaggaggacttcacctacagcaagaccaccctgaaggccctgaccatcgagcacatcaccaaccaggtgttcctgttcagccagaccgccctgtacaccgtgttcagcgagatgaacatcatgatgctgaccatcagcgacacccccttcatccacatgctgtgcccccacgcccccagcaccttcaagttcctgaacttcacccagaacgtgttcaccgacagcatcttcgagaagtgcagcaccctggtgaagctggagaccctgatcctgcagaagaacggcctgaaggacctgttcaaggtgggcctgatgaccaaggacatgcccagcctggagatcctggacgtgagctggaacagcctggagagcggcagacacaaggagaactgcacctgggtggagagcatcgtggtgctgaacctgagcagcaacatgctgaccgacagcgtgttcagatgcctgccccccagaatcaaggtgctggacctgcacagcaacaagatcaagagcgtgcccaagcaggtggtgaagctggaggccctgcaggagctgaacgtggccttcaacagcctgaccgacctgcccggctgcggcagcttcagcagcctgagcgtgctgatcatcgaccacaacagcgtgagccaccccagcgccgacttcttccagagctgccagaagatgagaagcatcaaggccggcgacaaccccttccagtgcacctgcgagctgagagagttcgtgaagaacatcgaccaggtgagcagcgaggtgctggagggctggcccgacagctacaagtgcgactaccccgagagctacagaggcagccccctgaaggacttccacatgagcgagctgagctgcaacatcaccctgctgatcgtgaccatcggcgccaccatgctggtgctggccgtgaccgtgaccagcctgtgcatctacctggacctgccctggtacctgagaatggtgtgccagtggacccagaccagaagaagagccagaaacatccccctggaggagctgcagagaaacctgcagttccacgccttcatcagctacagcgagcacgacagcgcctgggtgaagagcgagctggtgccctacctggagaaggaggacatccagatctgcctgcacgagagaaacttcgtgcccggcaagagcatcgtggagaacatcatcaactgcatcgagaagagctacaagagcatcttcgtgctgagccccaacttcgtgcagagcgagtggtgccactacgagctgtacttcgcccaccacaacctgttccacgagggcagcaacaacctgatcctgatcctgctggagcccatcccccagaacagcatccccaacaagtaccacaagctgaaggccctgatgatgcagagaacctacctgcagtggcccaaggagaagagcaagagaggcctgttctgggccaacatcagagccgccttcaacatgaagctgaccctggtgaccgagaacaacgacgtgaagagctga

SEQ ID NO: 9738 - RNA, 2391 nt, synthetic construct
  misc_feature 1..2391: note = derived and/or modified sequence opt5 fromTLR6__Homo_sapiens__AAY88759
  source 1..2391: mol_type = other RNA
atgaccaaggacaaagagcccatcgtgaagtccttccactttgtctgcctgatgattatcattgttggcacaagaatccagttctccgatgggaacgaatttgccgtggacaaatctaagcggggactcattcatgtgcctaaagatctgccgcttaagacgaaggtcctggacatgagccaaaattacatcgctgagctccaggtgtccgatatgtctttcctgagcgaacttaccgttctgcgcctctcccacaacagaatccagctgctggacctctctgtgtttaaattcaatcaggatctggagtatcttgacctgagccataaccaactccagaagatttcctgtcaccccatcgtcagctttcggcatctggatctttctttcaatgactttaaagccctgcctatttgcaaggagttcggcaacctctcccagctgaattttctggggctcagcgcgatgaaactgcagaagctcgatctgctccccatcgctcatctgcacctttcttacattctgctcgacctgcgcaactattacatcaaggagaatgagacagaatccctgcaaattctcaacgccaaaaccctgcaccttgtgttccaccctacaagcctgtttgccatccaggttaatatctctgtgaacaccctcggatgtctgcagcttacaaatattaagctgaacgatgacaattgccaggtcttcatcaaattcctctccgagctgaccagaggccccacgctgctcaactttaccctgaaccatattgaaacaacctggaagtgtcttgtgcgggtgttccaatttctgtggcctaaaccggtcgagtatctcaatatctacaacctgacaattatcgagagcatccgcgaagaggacttcacctattccaagacgacactgaaagctcttaccattgaacacatcacaaatcaggtttttctcttctctcagaccgccctgtacaccgtgtttagcgagatgaacattatgatgctgacaatctccgatacgcccttcattcacatgctctgccctcatgctcccagcacctttaagttcctgaattttacacaaaacgtgttcaccgactctatctttgaaaagtgttccacacttgtcaaactggagaccctcatcctgcagaagaatgggctgaaagatcttttcaaggtgggactcatgacgaaagacatgcctagcctggagattctggatgtttcttggaacagcctcgaatccggcagacacaaggagaattgcacatgggtggaatctatcgtcgtgctgaaccttagctccaatatgctgaccgacagcgttttccggtgtcttcccccgcgcattaaggtgctggatctgcattctaacaaaatcaagtccgtccctaaacaggtggtcaaacttgaggccctccaggaactgaatgtggcgtttaacagcctgaccgacctccccggctgcgggtctttctccagcctgtccgttcttattatcgatcacaattctgtgagccatccttccgccgactttttccaatcttgtcagaagatgagaagcattaaggctggagataacccctttcagtgcacatgcgagctgcgggagttcgtcaagaacatcgaccaggtgtccagcgaagttctcgagggctggcccgactcttacaaatgtgattatcctgaatcctaccgcgggagcccgctgaaggactttcacatgtctgagctgtcctgcaatatcacccttctcattgtgacaatcggagccacgatgctggtcctggctgtgaccgtgacaagcctctgtatttatctggatcttccctggtacctgagaatggtttgccaatggacccagacacggcgcagagcccggaacatccctctcgaagaactgcagagaaatctgcagttccacgcgtttatttcttatagcgagcatgactccgcctgggtcaaaagcgaacttgtgccctacctggagaaggaagatatccaaatctgtctccacgagcgcaacttcgtgcctggcaaatctattgtcgagaatatcattaactgcatcgaaaagtcctataagagcatttttgtgctgtcccccaatttcgttcagtctgagtggtgtcattacgaactctactttgctcaccacaacctgttccatgaggggagcaataaccttatcctgatcctcctggaaccgattcctcagaatagcatccccaacaaatatcacaagctgaaagcccttatgatgcagcggacctacctgcaatggcctaaggagaaatctaagagaggactcttctgggctaatattcgcgccgcctttaacatgaaactgacgctcgtgaccgagaataacgacgtcaagagctga

SEQ ID NO: 9739 - protein, 796 aa, synthetic construct [sequence omitted]

SEQ ID NO: 9740 - RNA, 2391 nt, synthetic construct
  misc_feature 1..2391: note = TLR6__Homo_sapiens__AAY88760
  source 1..2391: mol_type = other RNA
atgaccaaagacaaagaacctattgttaaaagcttccattttgtttgccttatgatcataatagttggaaccagaatccagttctccgacggaaatgaatttgcagtagacaagtcaaaaagaggtcttattcatgttccaaaagacctaccgctgaaaaccaaagtcttagatatgtctcagaactacatcgctgagcttcaggtctctgacatgagctttctatcagagttgacagttttgagactttcccataacagaatccagctacttgatttaagtgttttcaagttcaaccaggatttagaatatttggatttatctcataatcagttgcaaaagatatcctgccatcctattgtgagtttcaggcatttagatctctcattcaatgatttcaaggccctgcccatctgtaaggaatttggcaacttatcacaactgaatttcttgggattgagtgctatgaagctgcaaaaattagatttgctgccaattgctcacttgcatctaagttatatccttctggatttaagaaattattatataaaagaaaatgagacagaaagtctacaaattctgaatgcaaaaacccttcaccttgtttttcacccaactagtttattcgctatccaagtgaacatatcagttaatactttagggtgcttacaactgactaatattaaattgaatgatgacaactgtcaagttttcattaaatttttatcagaactcaccagaggttcaaccttactgaattttaccctcaaccacatagaaacgacttggaaatgcctggtcagagtctttcaatttctttggcccaaacctgtggaatatctcaatatttacaatttaacaataattgaaagcattcgtgaagaagattttacttattctaaaacgacattgaaagcattgacaatagaacatatcacgaaccaagtttttctgttttcacagacagctttgtacaccgtgttttctgagatgaacattatgatgttaaccatttcagatacaccttttatacacatgctgtgtcctcatgcaccaagcacattcaagtttttgaactttacccagaacgttttcacagatagtatttttgaaaaatgttccacgttagttaaattggagacacttatcttacaaaagaatggattaaaagaccttttcaaagtaggtctcatgacgaaggatatgccttctttggaaatactggatgttagctggaattctttggaatctggtagacataaagaaaactgcacttgggttgagagtatagtggtgttaaatttgtcttcaaatatgcttactgactctgttttcagatgtttacctcccaggatcaaggtacttgatcttcacagcaataaaataaagagcattcctaaacaagtcgtaaaactggaagctttgcaagaactcaatgttgctttcaattctttaactgaccttcctggatgtggcagctttagcagcctttctgtattgatcattgatcacaattcagtttcccacccatcggctgatttcttccagagctgccagaagatgaggtcaataaaagcaggggacaatccattccaatgtacctgtgagctaagagaatttgtcaaaaatatagaccaagtatcaagtgaagtgttagagggctggcctgattcttataagtgtgactacccagaaagttatagaggaagcccactaaaggactttcacatgtctgaattatcctgcaacataactctgctgatcgtcaccatcggtgccaccatgctggtgttggctgtgactgtgacctccctctgcatctacttggatctgccctggtatctcaggatggtgtgccagtggacccagactcggcgcagggccaggaacatacccttagaagaactccaaagaaacctccagtttcatgcttttatttcatatagtgaacatgattctgcctgggtgaaaagtgaattggtaccttacctagaaaaagaagatatacagatttgtcttcatgagagaaactttgtccctggcaagagcattgtggaaaatatcatcaactgcattgagaagagttacaagtccatctttgttttgtctcccaactttgtccagagtgagtggtgccattacgaactctattttgcccatcacaatctctttcatgaaggatctaataacttaatcctcatcttactggaacccattccacagaacagcattcccaacaagtaccacaagctgaaggctctcatgatgcagcggacttatttgcagtggcccaaggagaaaagcaaacgtgggctcttttgggctaacattagagccgcttttaatatgaaattaacactagtcactgaaaacaatgatgtgaaatcttaa

SEQ ID NO: 9741 - RNA, 2391 nt, synthetic construct
  misc_feature 1..2391: note = derived and/or modified sequence opt1 fromTLR6__Homo_sapiens__AAY88760
  source 1..2391: mol_type = other RNA
atgaccaaggacaaggagcccatcgtcaagagcttccacttcgtgtgcctgatgatcatcatcgtgggcacccgcatccagttctccgacgggaacgagttcgccgtggacaagagcaagcggggcctcatccacgtcccgaaggacctgcccctgaagacgaaggtgctcgacatgtcccagaactacatcgccgagctccaggtgagcgacatgtccttcctgagcgagctgaccgtcctgcgcctgtcccacaaccggatccagctcctggacctgagcgtgttcaagttcaaccaggacctcgagtacctggacctgtcccacaaccagctccagaagatcagctgccaccccatcgtgtccttccgccacctggacctgagcttcaacgacttcaaggcgctccccatctgcaaggagttcgggaacctgtcccagctgaacttcctcggcctgagcgccatgaagctgcagaagctcgacctgctgccgatcgcccacctccacctgtcctacatcctgctcgacctgcggaactactacatcaaggagaacgagaccgagagcctgcagatcctcaacgccaagaccctgcacctggtcttccaccccacgtccctcttcgccatccaggtgaacatcagcgtgaacaccctggggtgcctgcagctcaccaacatcaagctgaacgacgacaactgccaggtcttcatcaagttcctgtccgagctcacccgcggcagcacgctgctgaacttcaccctcaaccacatcgagaccacctggaagtgcctggtgcgggtgttccagttcctgtggcccaagcccgtcgagtacctcaacatctacaacctgacgatcatcgagagcatccgcgaggaggacttcacctactccaagaccaccctgaaggcgctgacgatcgagcacatcaccaaccaggtgttcctcttcagccagaccgccctgtacaccgtgttctccgagatgaacatcatgatgctgacgatcagcgacaccccgttcatccacatgctctgcccccacgccccctccaccttcaagttcctgaacttcacccagaacgtcttcacggacagcatcttcgagaagtgctccaccctggtgaagctcgagaccctgatcctgcagaagaacggcctcaaggacctgttcaaggtggggctgatgaccaaggacatgcccagcctcgagatcctggacgtctcctggaacagcctggagtccggccggcacaaggagaactgcacgtgggtggagagcatcgtggtcctcaacctgtccagcaacatgctgaccgactccgtgttccgctgcctcccgccccggatcaaggtcctggacctgcacagcaacaagatcaagtccatccccaagcaggtcgtgaagctcgaggccctgcaggagctgaacgtggcgttcaacagcctcaccgacctgcccgggtgcggctccttcagcagcctgtccgtgctcatcatcgaccacaacagcgtgtcccacccgagcgccgacttcttccagtcctgccagaagatgcgcagcatcaaggccggggacaaccccttccagtgcacgtgcgagctgcgggagttcgtcaagaacatcgaccaggtgtccagcgaggtgctggagggctggcccgactcctacaagtgcgactaccccgagagctaccgcggctccccgctcaaggacttccacatgagcgagctgtcctgcaacatcaccctgctcatcgtcaccatcggggccaccatgctggtgctggccgtgaccgtcacgagcctctgcatctacctggacctgccctggtacctccggatggtgtgccagtggacccagacccgccggcgcgcgcggaacatccccctggaggagctgcagcgcaacctccagttccacgccttcatctcctacagcgagcacgactccgcctgggtcaagagcgagctggtgccctacctggagaaggaggacatccagatctgcctccacgagcggaacttcgtgccgggcaagagcatcgtggagaacatcatcaactgcatcgagaagtcctacaagagcatcttcgtcctgtcccccaacttcgtgcagagcgagtggtgccactacgagctgtacttcgcccaccacaacctcttccacgaggggtccaacaacctgatcctgatcctcctggagcccatcccccagaacagcatcccgaacaagtaccacaagctgaaggccctcatgatgcagcgcacctacctgcagtggcccaaggagaagtccaagcgcggcctgttctgggcgaacatccgggccgccttcaacatgaagctcaccctggtgacggagaacaacgacgtcaagagctga

SEQ ID NO: 9742 - RNA, 2391 nt, synthetic construct
  misc_feature 1..2391: note = derived and/or modified sequence opt2 fromTLR6__Homo_sapiens__AAY88760
  source 1..2391: mol_type = other RNA
atgaccaaggacaaggagcccatcgtcaagtccttccacttcgtctgcctcatgatcatcatcgtcggcacccgcatccagttctccgacggcaacgagttcgccgtcgacaagtccaagcgcggcctcatccacgtccccaaggacctccccctcaagaccaaggtcctcgacatgtcccagaactacatcgccgagctccaggtctccgacatgtccttcctctccgagctcaccgtcctccgcctctcccacaaccgcatccagctcctcgacctctccgtcttcaagttcaaccaggacctcgagtacctcgacctctcccacaaccagctccagaagatctcctgccaccccatcgtctccttccgccacctcgacctctccttcaacgacttcaaggccctccccatctgcaaggagttcggcaacctctcccagctcaacttcctcggcctctccgccatgaagctccagaagctcgacctcctccccatcgcccacctccacctctcctacatcctcctcgacctccgcaactactacatcaaggagaacgagaccgagtccctccagatcctcaacgccaagaccctccacctcgtcttccaccccacctccctcttcgccatccaggtcaacatctccgtcaacaccctcggctgcctccagctcaccaacatcaagctcaacgacgacaactgccaggtcttcatcaagttcctctccgagctcacccgcggctccaccctcctcaacttcaccctcaaccacatcgagaccacctggaagtgcctcgtccgcgtcttccagttcctctggcccaagcccgtcgagtacctcaacatctacaacctcaccatcatcgagtccatccgcgaggaggacttcacctactccaagaccaccctcaaggccctcaccatcgagcacatcaccaaccaggtcttcctcttctcccagaccgccctctacaccgtcttctccgagatgaacatcatgatgctcaccatctccgacacccccttcatccacatgctctgcccccacgccccctccaccttcaagttcctcaacttcacccagaacgtcttcaccgactccatcttcgagaagtgctccaccctcgtcaagctcgagaccctcatcctccagaagaacggcctcaaggacctcttcaaggtcggcctcatgaccaaggacatgccctccctcgagatcctcgacgtctcctggaactccctcgagtccggccgccacaaggagaactgcacctgggtcgagtccatcgtcgtcctcaacctctcctccaacatgctcaccgactccgtcttccgctgcctccccccccgcatcaaggtcctcgacctccactccaacaagatcaagtccatccccaagcaggtcgtcaagctcgaggccctccaggagctcaacgtcgccttcaactccctcaccgacctccccggctgcggctccttctcctccctctccgtcctcatcatcgaccacaactccgtctcccacccctccgccgacttcttccagtcctgccagaagatgcgctccatcaaggccggcgacaaccccttccagtgcacctgcgagctccgcgagttcgtcaagaacatcgaccaggtctcctccgaggtcctcgagggctggcccgactcctacaagtgcgactaccccgagtcctaccgcggctcccccctcaaggacttccacatgtccgagctctcctgcaacatcaccctcctcatcgtcaccatcggcgccaccatgctcgtcctcgccgtcaccgtcacctccctctgcatctacctcgacctcccctggtacctccgcatggtctgccagtggacccagacccgccgccgcgcccgcaacatccccctcgaggagctccagcgcaacctccagttccacgccttcatctcctactccgagcacgactccgcctgggtcaagtccgagctcgtcccctacctcgagaaggaggacatccagatctgcctccacgagcgcaacttcgtccccggcaagtccatcgtcgagaacatcatcaactgcatcgagaagtcctacaagtccatcttcgtcctctcccccaacttcgtccagtccgagtggtgccactacgagctctacttcgcccaccacaacctcttccacgagggctccaacaacctcatcctcatcctcctcgagcccatcccccagaactccatccccaacaagtaccacaagctcaaggccctcatgatgcagcgcacctacctccagtggcccaaggagaagtccaagcgcggcctcttctgggccaacatccgcgccgccttcaacatgaagctcaccctcgtcaccgagaacaacgacgtcaagtcctga

SEQ ID NO: 9743 - RNA, 2391 nt, synthetic construct
  misc_feature 1..2391: note = derived and/or modified sequence opt3 fromTLR6__Homo_sapiens__AAY88760
  source 1..2391: mol_type = other RNA
atgaccaaggacaaagagcccatcgtcaagagcttccactttgtgtgcctgatgattataatcgttggcacaaggattcagttctccgatgggaacgaatttgccgtggacaaatctaagagaggactcatccatgtacctaaagatcttccactgaagactaaggtgttggacatgtcacaaaattacattgctgagttacaggtcagtgatatgagcttcctgtccgaactaacggtgctccggctgtctcacaaccgcatccagcttctggacttgtcggtttttaaattcaatcaggatctcgagtatctggacctgtcacataaccaactccagaagataagctgtcacccgatcgtgagttttcgacatttagatctgtccttcaatgactttaaagcacttcccatttgcaaggagttcggtaacttgtctcagctgaattttctaggcctcagcgccatgaaactgcagaaacttgatctgttgcctatcgcgcacctccacctgtcctacattttactggacctccgtaactattacatcaaggagaatgagaccgaatcacttcaaatactgaacgctaagacattgcatctagtcttccacccaacttctctgtttgccattcaggtgaatatcagcgtaaacaccctcgggtgtctgcagcttacaaatattaagctgaacgatgacaattgccaggttttcatcaaattcttgtctgagctcaccagaggatccactctgttaaactttacactgaaccatatcgaaaccacgtggaagtgtctagtgagggtcttccaatttctctggcccaaacctgtggagtatctgaatatttacaaccttactataatcgagtcaattcgggaagaggacttcacctatagcaagacaactttgaaagcactgaccatcgaacacataacaaatcaggtgtttctcttcagtcagaccgccctgtacacggtcttttctgagatgaacattatgatgcttactatctccgatacaccattcatccacatgctgtgcccccatgctcctagcacctttaagttcttgaattttactcaaaacgttttcacagactcgatttttgaaaagtgttctaccctcgtgaaactggagacgttaatcctgcagaagaatggcctaaaagatctcttcaaggtaggtctgatgaccaaagacatgccatcccttgagattttggatgtgtcatggaacagtctggaaagcgggcgccacaaggagaattgcacatgggtcgaatccatagtggttctcaacctgtctagcaatatgttaactgactcagtgttcagatgtctgccgcccaggatcaaggtccttgatttgcatagtaacaaaattaagtccatccctaaacaggtggtaaagctcgaggcactgcaggaactaaatgttgcctttaacagcctgaccgacctcccaggatgcggctctttctcaagtctgagcgtgcttatcattgatcacaattccgtctctcatccctcggctgactttttccaaagctgtcagaaaatgcggtccataaaggccggcgataacccttttcagtgcacatgcgagttgcgcgagttcgtgaagaacatcgaccaggtctcaagtgaagtgctggaggggtggccagactcttacaaatgtgattatcccgaaagctaccgaggatccccgttaaaggactttcacatgtcagagctcagctgcaatattactctgcttatcgttaccattggtgcgacaatgctggtgttggcagtaaccgtcacttctctctgtatctatctggatctaccttggtacctgagaatggtgtgccaatggacgcagacaaggcggcgtgcccgcaacatacccctcgaagaactgcagagaaatcttcagttccacgcttttatctcctatagtgagcatgacagcgcctgggttaaatctgaattggtgccatacctggagaaggaagatattcaaatctgtttacacgagaggaacttcgtccctggcaaatccattgtggagaatatcataaactgcattgaaaagtcatataagagtatctttgtactcagccccaatttcgtgcagtcggagtggtgtcattacgaactgtactttgcacaccacaaccttttccatgaggggtccaataacctgattctaatcctcctggaaccaataccccagaatagtatccctaacaaatatcacaagttgaaagctctgatgatgcagcggacctacttacaatggccaaaggagaaaagcaagcgaggactcttctgggccaatattcgcgcggcctttaacatgaaactgactcttgttaccgagaataacgacgtcaagtcatga

SEQ ID NO: 9744 - RNA, 2391 nt, synthetic construct
  misc_feature 1..2391: note = derived and/or modified sequence opt4 fromTLR6__Homo_sapiens__AAY88760
  source 1..2391: mol_type = other RNA
atgaccaaggacaaggagcccatcgtgaagagcttccacttcgtgtgcctgatgatcatcatcgtgggcaccagaatccagttcagcgacggcaacgagttcgccgtggacaagagcaagagaggcctgatccacgtgcccaaggacctgcccctgaagaccaaggtgctggacatgagccagaactacatcgccgagctgcaggtgagcgacatgagcttcctgagcgagctgaccgtgctgagactgagccacaacagaatccagctgctggacctgagcgtgttcaagttcaaccaggacctggagtacctggacctgagccacaaccagctgcagaagatcagctgccaccccatcgtgagcttcagacacctggacctgagcttcaacgacttcaaggccctgcccatctgcaaggagttcggcaacctgagccagctgaacttcctgggcctgagcgccatgaagctgcagaagctggacctgctgcccatcgcccacctgcacctgagctacatcctgctggacctgagaaactactacatcaaggagaacgagaccgagagcctgcagatcctgaacgccaagaccctgcacctggtgttccaccccaccagcctgttcgccatccaggtgaacatcagcgtgaacaccctgggctgcctgcagctgaccaacatcaagctgaacgacgacaactgccaggtgttcatcaagttcctgagcgagctgaccagaggcagcaccctgctgaacttcaccctgaaccacatcgagaccacctggaagtgcctggtgagagtgttccagttcctgtggcccaagcccgtggagtacctgaacatctacaacctgaccatcatcgagagcatcagagaggaggacttcacctacagcaagaccaccctgaaggccctgaccatcgagcacatcaccaaccaggtgttcctgttcagccagaccgccctgtacaccgtgttcagcgagatgaacatcatgatgctgaccatcagcgacacccccttcatccacatgctgtgcccccacgcccccagcaccttcaagttcctgaacttcacccagaacgtgttcaccgacagcatcttcgagaagtgcagcaccctggtgaagctggagaccctgatcctgcagaagaacggcctgaaggacctgttcaaggtgggcctgatgaccaaggacatgcccagcctggagatcctggacgtgagctggaacagcctggagagcggcagacacaaggagaactgcacctgggtggagagcatcgtggtgctgaacctgagcagcaacatgctgaccgacagcgtgttcagatgcctgccccccagaatcaaggtgctggacctgcacagcaacaagatcaagagcatccccaagcaggtggtgaagctggaggccctgcaggagctgaacgtggccttcaacagcctgaccgacctgcccggctgcggcagcttcagcagcctgagcgtgctgatcatcgaccacaacagcgtgagccaccccagcgccgacttcttccagagctgccagaagatgagaagcatcaaggccggcgacaaccccttccagtgcacctgcgagctgagagagttcgtgaagaacatcgaccaggtgagcagcgaggtgctggagggctggcccgacagctacaagtgcgactaccccgagagctacagaggcagccccctgaaggacttccacatgagcgagctgagctgcaacatcaccctgctgatcgtgaccatcggcgccaccatgctggtgctggccgtgaccgtgaccagcctgtgcatctacctggacctgccctggtacctgagaatggtgtgccagtggacccagaccagaagaagagccagaaacatccccctggaggagctgcagagaaacctgcagttccacgccttcatcagctacagcgagcacgacagcgcctgggtgaagagcgagctggtgccctacctggagaaggaggacatccagatctgcctgcacgagagaaacttcgtgcccggcaagagcatcgtggagaacatcatcaactgcatcgagaagagctacaagagcatcttcgtgctgagccccaacttcgtgcagagcgagtggtgccactacgagctgtacttcgcccaccacaacctgttccacgagggcagcaacaacctgatcctgatcctgctggagcccatcccccagaacagcatccccaacaagtaccacaagctgaaggccctgatgatgcagagaacctacctgcagtggcccaaggagaagagcaagagaggcctgttctgggccaacatcagagccgccttcaacatgaagctgaccctggtgaccgagaacaacgacgtgaagagctga

SEQ ID NO: 9745 - RNA, 2391 nt, synthetic construct
  misc_feature 1..2391: note = derived and/or modified sequence opt5 fromTLR6__Homo_sapiens__AAY88760
  source 1..2391: mol_type = other RNA
atgaccaaggacaaagagcccatcgtgaagtctttccactttgtctgcctgatgattatcattgttggcacaagaatccagttctccgatgggaacgaatttgccgtggacaaatctaagcggggactcattcatgtgcctaaagatctgccgcttaagacgaaggtcctggacatgagccaaaattacatcgctgagctccaggtgtccgatatgtctttcctgagcgaacttaccgttctgcgcctctcccacaacagaatccagctgctggacctctctgtgtttaaattcaatcaggatctggagtatcttgacctgagccataaccaactccagaagatttcctgtcaccccatcgtcagctttcggcatctggatctttctttcaatgactttaaagccctgcctatttgcaaggagttcggcaacctctcccagctgaattttctggggctcagcgcgatgaaactgcagaagctggatctgctccccatcgctcaccttcacctttcttacattctgctcgacctgcgcaactattacatcaaggagaatgagacagaatccctgcaaattctcaacgccaaaaccctgcatcttgtgttccaccctacaagcctgtttgccatccaggttaatatctctgtgaacaccctcggatgtctgcagcttacaaatattaagctgaacgatgacaattgccaggtcttcatcaaattcctctccgagctgaccagaggcagcacgctgctcaactttaccctgaaccatattgaaacaacctggaagtgtcttgtgcgggtgttccaatttctgtggcccaaacctgtcgagtatctcaatatctacaacctgacaattatcgagtccatccgcgaagaggacttcacctattctaagacgacactgaaagctcttaccattgaacacatcacaaatcaggtttttctcttcagccagaccgccctgtacaccgtgttttccgagatgaacattatgatgctgacaatcagcgatacgccgttcattcacatgctctgcccccatgctccttctacctttaagttcctgaattttacacaaaacgtgttcaccgactccatctttgaaaagtgtagcacacttgtcaaactggagaccctcatcctgcagaagaatgggctgaaagatcttttcaaggtgggactcatgacgaaagacatgccctctctggagattctggatgttagctggaactccctcgaatctggcagacacaaggagaattgcacatgggtggaaagcatcgtcgtgctgaacctttccagcaatatgctgaccgactctgttttccggtgtctccctccccgcattaaggtgctggatctgcattccaacaaaatcaagagcattccgaaacaggtcgtgaaacttgaggccctccaggaactgaatgtcgcgtttaactctctgaccgacctccctggctgcgggtccttcagctccctgtctgtgcttatcattgatcacaatagcgtttcccatccctctgccgactttttccaaagctgtcagaagatgagatccatcaaggctggagataacccttttcagtgcacatgcgagctgcgggagttcgtgaagaacatcgaccaggtcagctctgaagtgctcgagggctggcccgactcctacaaatgtgattatcccgaaagctaccgcgggtctcctctgaaggactttcacatgtccgagctgagctgcaatattacccttctcatcgttacaattggagccacgatgctggtgctggctgtcaccgtgacatctctctgtatctatctggatcttccgtggtacctgagaatggtgtgccaatggacccagacacggcgcagagcccggaacattcccctcgaagaactgcagagaaatctgcagttccacgcgtttatcagctattccgagcatgacagcgcctgggttaaatctgaacttgtcccttacctggagaaggaagatatccaaatttgtctccacgagcgcaacttcgtgcccggcaaatccatcgtggagaatattatcaactgcattgaaaagagctataagtccatctttgtcctgtctcctaatttcgtgcagagcgagtggtgtcattacgaactctactttgctcaccacaacctgttccatgaggggtccaataaccttatcctgattctcctggaacccatcccgcagaatagcattcctaacaaatatcacaagctgaaagcccttatgatgcagcggacctacctgcaatggcccaaggagaaaagcaagagaggactcttctgggctaatatccgcgccgcctttaacatgaaactgacgctcgttaccgagaataacgacgtgaagtcctga

SEQ ID NO: 9746 - protein, 796 aa, synthetic construct [sequence omitted]

SEQ ID NO: 9747 - RNA, 2391 nt, synthetic construct
  misc_feature 1..2391: note = TLR6__Homo_sapiens__AAY88761
  source 1..2391: mol_type = other RNA
atgaccaaagacaaagaacctattgttaaaagcttccattttgtttgccttatgatcataatagttggaaccagaatccagttctccgacggaaatgaatttgcagtagacaagtcaaaaagaggtcttattcatgttccaaaagacctaccgctgaaaaccaaagtcttagatatgtctcagaactacatcgctgagcttcaggtctctgacatgagctttctatcagagttgacagttttgagactttcccataacagaatccagctacttgatttaagtgttttcaagttcaaccaggatttagaatatttggatttatctcataatcagttgcaaaagatatcctgccatcctattgtgagtttcaggcatttagatctctcattcaatgatttcaaggccctgcccatctgtaaggaatttggcaacttatcacaactgaatttcttgggattgagtgctatgaagctgcaaaaattagatttgctgccaattgctcacttgcatctaagttatatccttctggatttaagaaattattatataaaagaaaatgagacagaaagtctacaaattctgaatgcaaaaacccttcaccttgtttttcacccaactagtttattcgctatccaagtgaacatatcagttaatactttagggtgcttacaactgactaatattaaattgaatgatgacaactgtcaagttttcattaaatttttatcagaactcaccagaggtccaaccttactgaattttaccctcaaccacatagaaacgacttggaaatgcctggtcagagtctttcaatttctttggcccaaacctgtggaatatctcaatatttacaatttaacaataattgaaagcattcgtgaagaagattttacttattctaaaacgacattgaaagcattgacaatagaacatatcacgaaccaagtttttctgttttcacagacagctttgtacaccatgttttctgagatgaacattatgatgttaaccatttcagatacaccttttatacacatgctgtgtcctcatgcaccaagcacattcaagtttttgaactttacgcagaacgttttcacagatagtatttttgaaaaatgttccacgttagttaaattggagacacttatcttacaaaagaatggattaaaagaccttttcaaagtaggtctcatgacgaaggatatgccttctttggaaatactggatgttagctggaattctttggaatctggtagacataaggaaaactgcacttgggttgagagtatagtggtgttaaatttgtcttcaaatatgcttactgactctgttttcagatgtttacctcccaggatcaaggtacttgatcttcacagcaataaaataaagagcattcctaaacaagtcgtaaaactggaagctttgcaagaactcaatgttgctttcaattctttaactgaccttcctggatgtggcagctttagcagcctttctgtattgatcattgatcacaattcagtttcccacccatcggctgatttcttccagagctgccagaagatgaggtcaataaaagcaggggacaatccattccaatgtacctgtgagctaagagaatttgtcaaaaatatagaccaagtatcaagtgaagtgttagagggctggcctgattcttataagtgtgactacccagaaagttatagaggaagcccactaaaggactttcacatgtctgaattatcctgcaacataactctgctgatcgtcaccatcggtgccaccatgctggtgttggctgtgactgtgacctccctctgcatctacttggatctgccctggtatctcaggatggtgtgccagtggacccagactcggcgcagggccaggaacatacccttagaagaactccaaagaaacctccagtttcatgcttttatttcatatagtgaacatgattctgcctgggtgaaaagtgaattggtaccttacctagaaaaagaagatatacagatttgtcttcatgagagaaactttgtccctggcaagagcattgtggaaaatatcatcaactgcattgagaagagttacaagtccatctttgttttgtctcccaactttgtccagagtgagtggtgccattacgaactctattttgcccatcacaatctctttcatgaaggatctaataacttaatcctcatcttactggaacccattccacagaacagcattcccaacaagtaccacaagctgaaggctctcatgatgcagcggacttatttgcagtggcccaaggagaaaagcaaacgtgggctcttttgggctaacattagagccgcttttaatatgaaattaacactagtcactgaaaacaatgatgtgaaatcttaa

SEQ ID NO: 9748 - RNA, 2391 nt, synthetic construct
  misc_feature 1..2391: note = derived and/or modified sequence opt1 fromTLR6__Homo_sapiens__AAY88761
  source 1..2391: mol_type = other RNA
atgaccaaggacaaggagcccatcgtcaagagcttccacttcgtgtgcctgatgatcatcatcgtgggcacccgcatccagttcagcgacgggaacgagttcgccgtggacaagagcaagcggggcctcatccacgtcccgaaggacctgcccctgaagacgaaggtgctcgacatgtcccagaactacatcgccgagctccaggtgagcgacatgtccttcctgagcgagctgaccgtcctgcgcctgtcccacaaccggatccagctcctggacctgagcgtgttcaagttcaaccaggacctcgagtacctggacctgtcccacaaccagctccagaagatcagctgccaccccatcgtgtccttccgccacctggacctgagcttcaacgacttcaaggcgctccccatctgcaaggagttcgggaacctgtcccagctgaacttcctcggcctgagcgccatgaagctgcagaagctcgacctgctgccgatcgcccacctccacctgtcctacatcctgctcgacctgcggaactactacatcaaggagaacgagaccgagagcctgcagatcctcaacgccaagaccctgcacctggtcttccaccccacgtccctcttcgccatccaggtgaacatcagcgtgaacaccctggggtgcctgcagctcaccaacatcaagctgaacgacgacaactgccaggtcttcatcaagttcctgtccgagctcacccgcggccccacgctgctgaacttcaccctcaaccacatcgagaccacctggaagtgcctggtgcgggtgttccagttcctgtggcccaagccggtcgagtacctcaacatctacaacctgacgatcatcgagagcatccgcgaggaggacttcacctacagcaagaccaccctgaaggcgctgacgatcgagcacatcaccaaccaggtgttcctcttctcccagaccgccctgtacaccatgttcagcgagatgaacatcatgatgctgacgatctccgacacccccttcatccacatgctctgcccccacgcccccagcaccttcaagttcctgaacttcacccagaacgtgttcacggactccatcttcgagaagtgcagcaccctggtcaagctcgagaccctgatcctgcagaagaacggcctcaaggacctgttcaaggtggggctgatgaccaaggacatgccgtccctcgagatcctggacgtgagctggaactccctggagagcggccggcacaaggagaactgcacgtgggtcgagtccatcgtggtgctcaacctgagctccaacatgctgaccgacagcgtcttccgctgcctcccgccccggatcaaggtgctggacctgcactccaacaagatcaagagcatccccaagcaggtcgtgaagctcgaggccctgcaggagctgaacgtggcgttcaactccctcaccgacctgcccgggtgcggcagcttctccagcctgagcgtcctcatcatcgaccacaactccgtgagccacccctccgccgacttcttccagagctgccagaagatgcgctccatcaaggccggggacaaccccttccagtgcacgtgcgagctgcgggagttcgtgaagaacatcgaccaggtcagctccgaggtgctggagggctggcccgacagctacaagtgcgactacccggagtcctaccgcggcagccccctcaaggacttccacatgtccgagctgagctgcaacatcaccctgctcatcgtgaccatcggggccaccatgctggtcctggccgtgaccgtgacgtccctctgcatctacctggacctgccctggtacctccggatggtctgccagtggacccagacccgccggcgcgcgcggaacatccccctggaggagctgcagcgcaacctccagttccacgccttcatcagctactccgagcacgacagcgcctgggtgaagtccgagctggtgccgtacctggagaaggaggacatccagatctgcctccacgagcggaacttcgtccccggcaagagcatcgtggagaacatcatcaactgcatcgagaagtcctacaagagcatcttcgtgctgagccccaacttcgtccagtccgagtggtgccactacgagctgtacttcgcccaccacaacctcttccacgaggggagcaacaacctgatcctgatcctcctggagcccatcccgcagaactccatccccaacaagtaccacaagctgaaggccctcatgatgcagcgcacctacctgcagtggcccaaggagaagtccaagcgcggcctgttctgggcgaacatccgggccgccttcaacatgaagctcaccctggtgacggagaacaacgacgtgaagtcctga

SEQ ID NO: 9749 - RNA, 2391 nt, synthetic construct
  misc_feature 1..2391: note = derived and/or modified sequence opt2 fromTLR6__Homo_sapiens__AAY88761
  source 1..2391: mol_type = other RNA
atgaccaaggacaaggagcccatcgtcaagtccttccacttcgtctgcctcatgatcatcatcgtcggcacccgcatccagttctccgacggcaacgagttcgccgtcgacaagtccaagcgcggcctcatccacgtccccaaggacctccccctcaagaccaaggtcctcgacatgtcccagaactacatcgccgagctccaggtctccgacatgtccttcctctccgagctcaccgtcctccgcctctcccacaaccgcatccagctcctcgacctctccgtcttcaagttcaaccaggacctcgagtacctcgacctctcccacaaccagctccagaagatctcctgccaccccatcgtctccttccgccacctcgacctctccttcaacgacttcaaggccctccccatctgcaaggagttcggcaacctctcccagctcaacttcctcggcctctccgccatgaagctccagaagctcgacctcctccccatcgcccacctccacctctcctacatcctcctcgacctccgcaactactacatcaaggagaacgagaccgagtccctccagatcctcaacgccaagaccctccacctcgtcttccaccccacctccctcttcgccatccaggtcaacatctccgtcaacaccctcggctgcctccagctcaccaacatcaagctcaacgacgacaactgccaggtcttcatcaagttcctctccgagctcacccgcggccccaccctcctcaacttcaccctcaaccacatcgagaccacctggaagtgcctcgtccgcgtcttccagttcctctggcccaagcccgtcgagtacctcaacatctacaacctcaccatcatcgagtccatccgcgaggaggacttcacctactccaagaccaccctcaaggccctcaccatcgagcacatcaccaaccaggtcttcctcttctcccagaccgccctctacaccatgttctccgagatgaacatcatgatgctcaccatctccgacacccccttcatccacatgctctgcccccacgccccctccaccttcaagttcctcaacttcacccagaacgtcttcaccgactccatcttcgagaagtgctccaccctcgtcaagctcgagaccctcatcctccagaagaacggcctcaaggacctcttcaaggtcggcctcatgaccaaggacatgccctccctcgagatcctcgacgtctcctggaactccctcgagtccggccgccacaaggagaactgcacctgggtcgagtccatcgtcgtcctcaacctctcctccaacatgctcaccgactccgtcttccgctgcctccccccccgcatcaaggtcctcgacctccactccaacaagatcaagtccatccccaagcaggtcgtcaagctcgaggccctccaggagctcaacgtcgccttcaactccctcaccgacctccccggctgcggctccttctcctccctctccgtcctcatcatcgaccacaactccgtctcccacccctccgccgacttcttccagtcctgccagaagatgcgctccatcaaggccggcgacaaccccttccagtgcacctgcgagctccgcgagttcgtcaagaacatcgaccaggtctcctccgaggtcctcgagggctggcccgactcctacaagtgcgactaccccgagtcctaccgcggctcccccctcaaggacttccacatgtccgagctctcctgcaacatcaccctcctcatcgtcaccatcggcgccaccatgctcgtcctcgccgtcaccgtcacctccctctgcatctacctcgacctcccctggtacctccgcatggtctgccagtggacccagacccgccgccgcgcccgcaacatccccctcgaggagctccagcgcaacctccagttccacgccttcatctcctactccgagcacgactccgcctgggtcaagtccgagctcgtcccctacctcgagaaggaggacatccagatctgcctccacgagcgcaacttcgtccccggcaagtccatcgtcgagaacatcatcaactgcatcgagaagtcctacaagtccatcttcgtcctctcccccaacttcgtccagtccgagtggtgccactacgagctctacttcgcccaccacaacctcttccacgagggctccaacaacctcatcctcatcctcctcgagcccatcccccagaactccatccccaacaagtaccacaagctcaaggccctcatgatgcagcgcacctacctccagtggcccaaggagaagtccaagcgcggcctcttctgggccaacatccgcgccgccttcaacatgaagctcaccctcgtcaccgagaacaacgacgtcaagtcctga

SEQ ID NO: 9750 - RNA, 2391 nt, synthetic construct
  misc_feature 1..2391: note = derived and/or modified sequence opt3 fromTLR6__Homo_sapiens__AAY88761
  source 1..2391: mol_type = other RNA
atgaccaaggacaaagagcccatcgtcaagagcttccactttgtgtgcctgatgattataatcgttggcacaaggattcagttctccgatgggaacgaatttgccgtggacaaatctaagagaggactcatccatgtacctaaagatcttccactgaagactaaggtgttggacatgtcacaaaattacattgctgagttacaggtcagtgatatgagcttcctgtccgaactaacggtgctccggctgtctcacaaccgcatccagcttctggacttgtcggtttttaaattcaatcaggatctcgagtatctggacctgtcacataaccaactccagaagataagctgtcacccgatcgtgagttttcgacatttagatctgtccttcaatgactttaaagcacttcccatttgcaaggagttcggtaacttgtctcagctgaattttctaggcctcagcgccatgaaactgcagaaacttgatctgttgcctatcgcgcacctccacctgtcctacattttactggacctccgtaactattacatcaaggagaatgagaccgaatcacttcaaatactgaacgctaagacattgcatctagtcttccacccaacttccctgtttgccattcaggtgaatatcagcgtaaacaccctcgggtgtctgcagcttacaaatattaagctgaacgatgacaattgccaggttttcatcaaattcttgtctgagctcaccagaggacccactctgttaaactttacactgaaccatatcgaaaccacgtggaagtgtctagtgagggtcttccaatttctctggcctaaaccagtggagtatctgaatatttacaaccttactataatcgagtccattcgggaagaggacttcacctattcaaagacaactttgaaagcactgaccatcgaacacataacaaatcaggtgtttctcttcagccagaccgccctgtacacgatgtttagtgagatgaacattatgatgcttactatctctgatacacccttcatccacatgctgtgccctcatgctccatccacctttaagttcttgaattttactcaaaacgtcttcacagacagcatttttgaaaagtgttcgaccctcgttaaactggagacgttaatcctgcagaagaatggcctaaaagatctcttcaaggtgggtctgatgaccaaagacatgccgtctcttgagattttggatgtatcctggaactcactggaaagtgggcgccacaaggagaattgcacatgggtggaaagcatagtcgtgctcaacctgtcctctaatatgttaactgacagcgttttcagatgtctgccccctaggatcaaggtgcttgatttgcattcaaacaaaattaagagtatcccaaaacaggtcgtgaagctcgaggcactgcaggaactaaatgtagcctttaactccctgaccgacctccccggatgcggcagcttctcttcactgagtgttcttatcattgatcacaatagcgtgtcccatccttctgctgactttttccaatcgtgtcagaaaatgcggagcataaaggccggcgataacccatttcagtgcacatgcgagttgcgcgagttcgtcaagaacatcgaccaggtgtcctcagaagtcctggaggggtggcccgacagttacaaatgtgattatccggaatcttaccgaggaagccctttaaaggactttcacatgtccgagctctcatgcaatattactctgcttatcgtgaccattggtgcgacaatgctggttttggcagtgaccgtaactagcctctgtatctatctggatctaccctggtacctgagaatggtctgccaatggacgcagacaaggcggcgtgcccgcaacataccactcgaagaactgcagagaaatcttcagttccacgcttttatctcttattccgagcatgacagtgcctgggtgaaaagcgaattggttccttacctggagaaggaagatattcaaatctgtttacacgagaggaacttcgtgcccggcaaatctattgtcgagaatatcataaactgcattgaaaagtcctataagtcaatctttgtgctcagtccaaatttcgtacagagcgagtggtgtcattacgaactgtactttgcacaccacaaccttttccatgaggggtcgaataacctgattctaatcctcctggaacccatacctcagaatagtatcccaaacaaatatcacaagttgaaagctctgatgatgcagcggacctacttacaatggccgaaggagaaatctaagcgaggactcttctgggccaatattcgcgcggcctttaacatgaaactgactcttgtgaccgagaataacgacgttaagagctga

SEQ ID NO: 9751 - RNA, 2391 nt, synthetic construct
  misc_feature 1..2391: note = derived and/or modified sequence opt4 fromTLR6__Homo_sapiens__AAY88761
  source 1..2391: mol_type = other RNA
atgaccaaggacaaggagcccatcgtgaagagcttccacttcgtgtgcctgatgatcatcatcgtgggcaccagaatccagttcagcgacggcaacgagttcgccgtggacaagagcaagagaggcctgatccacgtgcccaaggacctgcccctgaagaccaaggtgctggacatgagccagaactacatcgccgagctgcaggtgagcgacatgagcttcctgagcgagctgaccgtgctgagactgagccacaacagaatccagctgctggacctgagcgtgttcaagttcaaccaggacctggagtacctggacctgagccacaaccagctgcagaagatcagctgccaccccatcgtgagcttcagacacctggacctgagcttcaacgacttcaaggccctgcccatctgcaaggagttcggcaacctgagccagctgaacttcctgggcctgagcgccatgaagctgcagaagctggacctgctgcccatcgcccacctgcacctgagctacatcctgctggacctgagaaactactacatcaaggagaacgagaccgagagcctgcagatcctgaacgccaagaccctgcacctggtgttccaccccaccagcctgttcgccatccaggtgaacatcagcgtgaacaccctgggctgcctgcagctgaccaacatcaagctgaacgacgacaactgccaggtgttcatcaagttcctgagcgagctgaccagaggccccaccctgctgaacttcaccctgaaccacatcgagaccacctggaagtgcctggtgagagtgttccagttcctgtggcccaagcccgtggagtacctgaacatctacaacctgaccatcatcgagagcatcagagaggaggacttcacctacagcaagaccaccctgaaggccctgaccatcgagcacatcaccaaccaggtgttcctgttcagccagaccgccctgtacaccatgttcagcgagatgaacatcatgatgctgaccatcagcgacacccccttcatccacatgctgtgcccccacgcccccagcaccttcaagttcctgaacttcacccagaacgtgttcaccgacagcatcttcgagaagtgcagcaccctggtgaagctggagaccctgatcctgcagaagaacggcctgaaggacctgttcaaggtgggcctgatgaccaaggacatgcccagcctggagatcctggacgtgagctggaacagcctggagagcggcagacacaaggagaactgcacctgggtggagagcatcgtggtgctgaacctgagcagcaacatgctgaccgacagcgtgttcagatgcctgccccccagaatcaaggtgctggacctgcacagcaacaagatcaagagcatccccaagcaggtggtgaagctggaggccctgcaggagctgaacgtggccttcaacagcctgaccgacctgcccggctgcggcagcttcagcagcctgagcgtgctgatcatcgaccacaacagcgtgagccaccccagcgccgacttcttccagagctgccagaagatgagaagcatcaaggccggcgacaaccccttccagtgcacctgcgagctgagagagttcgtgaagaacatcgaccaggtgagcagcgaggtgctggagggctggcccgacagctacaagtgcgactaccccgagagctacagaggcagccccctgaaggacttccacatgagcgagctgagctgcaacatcaccctgctgatcgtgaccatcggcgccaccatgctggtgctggccgtgaccgtgaccagcctgtgcatctacctggacctgccctggtacctgagaatggtgtgccagtggacccagaccagaagaagagccagaaacatccccctggaggagctgcagagaaacctgcagttccacgccttcatcagctacagcgagcacgacagcgcctgggtgaagagcgagctggtgccctacctggagaaggaggacatccagatctgcctgcacgagagaaacttcgtgcccggcaagagcatcgtggagaacatcatcaactgcatcgagaagagctacaagagcatcttcgtgctgagccccaacttcgtgcagagcgagtggtgccactacgagctgtacttcgcccaccacaacctgttccacgagggcagcaacaacctgatcctgatcctgctggagcccatcccccagaacagcatccccaacaagtaccacaagctgaaggccctgatgatgcagagaacctacctgcagtggcccaaggagaagagcaagagaggcctgttctgggccaacatcagagccgccttcaacatgaagctgaccctggtgaccgagaacaacgacgtgaagagctga

SEQ ID NO: 9752 - RNA, 2391 nt, synthetic construct
  misc_feature 1..2391: note = derived and/or modified sequence opt5 fromTLR6__Homo_sapiens__AAY88761
  source 1..2391: mol_type = other RNA
atgaccaaggacaaagagcccatcgtgaagtccttccactttgtctgcctgatgattatcattgttggcacaagaatccagttctccgatgggaacgaatttgccgtggacaaatctaagcggggactcattcatgtgcctaaagatctgccgcttaagacgaaggtcctggacatgagccaaaattacatcgctgagctccaggtgtccgatatgtctttcctgagcgaacttaccgttctgcgcctctcccacaacagaatccagctgctggacctctctgtgtttaaattcaatcaggatctggagtatcttgacctgagccataaccaactccagaagatttcctgtcaccccatcgtcagctttcggcatctggatctttctttcaatgactttaaagccctgcctatttgcaaggagttcggcaacctctcccagctgaattttctggggctcagcgcgatgaaactgcagaagctcgatctgctccccatcgctcatctgcacctttcttacattctgctcgacctgcgcaactattacatcaaggagaatgagacagaatccctgcaaattctcaacgccaaaaccctgcaccttgtgttccaccctacaagcctgtttgccatccaggttaatatctctgtgaacaccctcggatgtctgcagcttacaaatattaagctgaacgatgacaattgccaggtcttcatcaaattcctctccgagctgaccagaggccccacgctgctcaactttaccctgaaccatattgaaacaacctggaagtgtcttgtgcgggtgttccaatttctgtggcctaaaccggtcgagtatctcaatatctacaacctgacaattatcgagagcatccgcgaagaggacttcacctattccaagacgacactgaaagctcttaccattgaacacatcacaaatcaggtttttctcttctctcagaccgccctgtacaccatgtttagcgagatgaacattatgatgctgacaatctccgatacgcccttcattcacatgctctgccctcatgctcccagcacctttaagttcctgaattttacacaaaacgtgttcaccgactctatctttgaaaagtgttccacacttgtgaaactggagaccctcatcctgcagaagaatgggctgaaagatcttttcaaggtcggactcatgacgaaagacatgcctagcctggagattctggatgtgtcttggaacagcctcgaatccggcagacacaaggagaattgcacatgggttgaatctatcgtggtcctgaaccttagctccaatatgctgaccgacagcgtgttccggtgtcttcccccgcgcattaaggttctggatctgcattctaacaaaatcaagtccattcctaaacaggtggtcaaacttgaggccctccaggaactgaatgtggcgtttaacagcctgaccgacctccccggctgcgggtctttctccagcctgtccgtccttatcattgatcacaattctgtgagccatccttccgccgactttttccaatcttgtcagaagatgagaagcatcaaggctggagataacccctttcagtgcacatgcgagctgcgggagttcgttaagaacatcgaccaggtgtccagcgaagtcctcgagggctggcccgactcttacaaatgtgattatcctgaatcctaccgcgggagcccgctgaaggactttcacatgtctgagctgtcctgcaatattacccttctcatcgtgacaattggagccacgatgctggttctggctgtgaccgtcacaagcctctgtatctatctggatcttccctggtacctgagaatggtgtgccaatggacccagacacggcgcagagcccggaacattcctctcgaagaactgcagagaaatctgcagttccacgcgtttatctcttatagcgagcatgactccgcctgggtgaaaagcgaacttgttccctacctggagaaggaagatatccaaatttgtctccacgagcgcaacttcgtccctggcaaatctatcgtggagaatattatcaactgcattgaaaagtcctataagagcatctttgtgctgtcccccaatttcgtccagtctgagtggtgtcattacgaactctactttgctcaccacaacctgttccatgaggggagcaataaccttatcctgattctcctggaaccgatccctcagaatagcattcccaacaaatatcacaagctgaaagcccttatgatgcagcggacctacctgcaatggcctaaggagaaatctaagagaggactcttctgggctaatatccgcgccgcctttaacatgaaactgacgctcgtgaccgagaataacgacgttaagagctga

SEQ ID NO: 9753 - protein, 796 aa, synthetic construct [sequence omitted]

SEQ ID NO: 9754 - RNA, 2391 nt, synthetic construct
  misc_feature 1..2391: note = TLR6__Homo_sapiens__AAY88762
  source 1..2391: mol_type = other RNA
atgaccaaagacaaagaacctattgttaaaagcttccattttgtttgccttatgatcataatagttggaaccagaatccagttctccgacggaaatgaatttgcagtagacaagtcaaaaagaggtcttattcatgttccaaaagacctaccgctgaaaaccaaagtcttagatatgtctcagaactacatcgctgagcttcaggtctctgacatgagctttctatcagagttgacagttttgagactttcccataacagaatccagctacttgatttaagtgttttcaagttcaaccaggatttagaatatttggatttatctcataatcagttgcaaaagatatcctgccatcctactgtgagtttcaggcatttagatctctcattcaatgatttcaaggccctgcccatctgtaaggaatttggcaacttatcacaactgaatttcttgggattgagtgctatgaagctgcaaaaattagatttgctgccaattgctcacttgcatctaagttatatccttctggatttaagaaattattatataaaagaaaatgagacagaaagtctacaaattctgaatgcaaaaacccttcaccttgtttttcacccaactagtttattcgctatccaagtgaacatatcagttaatactttagggtgcttacaactgactaatattaaattgaatgatgacaactgtcaagttttcattaaatttttatcagaactcaccagaggtccaaccttactgaattttaccctcaaccacatagaaacgacttggaaatgcctggtcagagtctttcaatttctttggcccaaacctgtggaatatctcaatatttacaatttaacaataattgaaagcattcgtgaagaagattttacttattctaaaacgacattgaaagcattgacaatagaacatatcacgaaccaagtttttctgttttcacagacagctttgtacaccgtgttttctgagatgaacattatgatgttaaccatttcagatacaccttttatacacatgctgtgtcctcatgcaccaagcacattcaagtttttgaactttacgcagaacgttttcacagatagtatttttgaaaaatgttccacgttagttaaattggagacacttatcttacaaaagaatggattaaaagaccttttcaaagtaggtctcatgacgaaggatatgccttctttggaaatactggatgttagctggaattctttggaatctggtagacataaggaaaactgcacttgggttgagagtatagtggtgttaaatttgtcttcaaatatgcttactgactctgttttcagatgtttacctcccaggatcaaggtacttgatcttcacagcaataaaataaagagcattcctaaacaagtcgtaaaactggaagctttgcaagaactcaatgttgctttcaattctttaactgaccttcctggatgtggcagctttagcagcctttctgtattgatcattgatcacaattcagtttcccacccatcggctgatttcttccagagctgccagaagatgaggtcaataaaagcaggggacaatccattccaatgtacctgtgagctaagagaatttgtcaaaaatatagaccaagtatcaagtgaagtgttagagggctggcctgattcttataagtgtgactacccagaaagttatagaggaagcccactaaaggactttcacatgtctgaattatcctgcaacataactctgctgatcgtcaccatcggtgccaccatgctggtgttggctgtgactgtgacctccctctgcatctacttggatctgccctggtatctcaggatggtgtgccagtggacccagactcggcgcagggccaggaacatacccttagaagaactccaaagaaacctccagtttcatgcttttatttcatatagtgaacatgattctgcctgggtgaaaagtgaattggtaccttacctagaaaaagaagatatacagatttgtcttcatgagagaaactttgtccctggcaagagcattgtggaaaatatcatcaactgcattgagaagagttacaagtccatctttgttttgtctcccaactttgtccagagtgagtggtgccattacgaactctattttgcccatcacaatctctttcatgaaggatctaataacttaatcctcatcttactggaacccattccacagaacagcattcccaacaagtaccacaagctgaaggctctcatgatgcagcggacttatttgcagtggcccaaggagaaaagcaaacgtgggctcttttgggctaacattagagccgcttttaatatgaaattaacactagtcactgaaaacaatgatgtgaaatcttaa

SEQ ID NO: 9755 - RNA, 2391 nt, synthetic construct
  misc_feature 1..2391: note = derived and/or modified sequence opt1 fromTLR6__Homo_sapiens__AAY88762
  source 1..2391: mol_type = other RNA
atgaccaaggacaaggagcccatcgtcaagagcttccacttcgtgtgcctgatgatcatcatcgtgggcacccgcatccagttctccgacgggaacgagttcgccgtggacaagagcaagcggggcctcatccacgtcccgaaggacctgcccctgaagacgaaggtgctcgacatgtcccagaactacatcgccgagctccaggtgagcgacatgtccttcctgagcgagctgaccgtcctgcgcctgtcccacaaccggatccagctcctggacctgagcgtgttcaagttcaaccaggacctcgagtacctggacctgtcccacaaccagctccagaagatcagctgccaccccaccgtgtccttccgccacctggacctgagcttcaacgacttcaaggcgctccccatctgcaaggagttcgggaacctgtcccagctgaacttcctcggcctgagcgccatgaagctgcagaagctcgacctgctgccgatcgcccacctccacctgtcctacatcctgctcgacctgcggaactactacatcaaggagaacgagaccgagagcctgcagatcctcaacgccaagacgctgcacctggtcttccaccccacctccctcttcgccatccaggtgaacatcagcgtgaacaccctggggtgcctgcagctcaccaacatcaagctgaacgacgacaactgccaggtcttcatcaagttcctgtccgagctcacgcgcggccccaccctgctgaacttcaccctcaaccacatcgagaccacgtggaagtgcctggtgcgggtgttccagttcctgtggcccaagccggtcgagtacctcaacatctacaacctgaccatcatcgagagcatccgcgaggaggacttcacctacagcaagaccacgctgaaggcgctgaccatcgagcacatcaccaaccaggtgttcctcttctcccagaccgccctgtacacggtgttcagcgagatgaacatcatgatgctgaccatctccgacacccccttcatccacatgctctgcccccacgcccccagcaccttcaagttcctgaacttcacgcagaacgtcttcaccgactccatcttcgagaagtgcagcaccctggtgaagctcgagaccctgatcctgcagaagaacggcctcaaggacctgttcaaggtggggctgatgacgaaggacatgccgtccctcgagatcctggacgtcagctggaactccctggagagcggccggcacaaggagaactgcacctgggtggagtccatcgtggtcctcaacctgagctccaacatgctgaccgacagcgtgttccgctgcctcccgccccggatcaaggtcctggacctgcactccaacaagatcaagagcatccccaagcaggtcgtgaagctcgaggccctgcaggagctgaacgtggcgttcaactccctcaccgacctgcccgggtgcggcagcttctccagcctgagcgtgctcatcatcgaccacaactccgtgagccacccctccgccgacttcttccagagctgccagaagatgcgctccatcaaggccggggacaaccccttccagtgcacgtgcgagctgcgggagttcgtcaagaacatcgaccaggtgagctccgaggtgctggagggctggcccgacagctacaagtgcgactacccggagtcctaccgcggcagccccctcaaggacttccacatgtccgagctgagctgcaacatcaccctgctcatcgtcaccatcggggccaccatgctggtgctggccgtgacggtcacctccctctgcatctacctggacctgccctggtacctccggatggtgtgccagtggacccagacccgccggcgcgcgcggaacatccccctggaggagctgcagcgcaacctccagttccacgccttcatcagctactccgagcacgacagcgcctgggtgaagtccgagctggtcccgtacctggagaaggaggacatccagatctgcctccacgagcggaacttcgtgcccggcaagagcatcgtggagaacatcatcaactgcatcgagaagtcctacaagagcatcttcgtcctgagccccaacttcgtgcagtccgagtggtgccactacgagctgtacttcgcccaccacaacctcttccacgaggggagcaacaacctgatcctgatcctcctggagcccatcccgcagaactccatccccaacaagtaccacaagctgaaggccctcatgatgcagcgcacctacctgcagtggcccaaggagaagtccaagcgcggcctgttctgggcgaacatccgggccgccttcaacatgaagctcacgctggtgaccgagaacaacgacgtcaagagctga

SEQ ID NO: 9756 - RNA, 2391 nt, synthetic construct
  misc_feature 1..2391: note = derived and/or modified sequence opt2 fromTLR6__Homo_sapiens__AAY88762
  source 1..2391: mol_type = other RNA
atgaccaaggacaaggagcccatcgtcaagtccttccacttcgtctgcctcatgatcatcatcgtcggcacccgcatccagttctccgacggcaacgagttcgccgtcgacaagtccaagcgcggcctcatccacgtccccaaggacctccccctcaagaccaaggtcctcgacatgtcccagaactacatcgccgagctccaggtctccgacatgtccttcctctccgagctcaccgtcctccgcctctcccacaaccgcatccagctcctcgacctctccgtcttcaagttcaaccaggacctcgagtacctcgacctctcccacaaccagctccagaagatctcctgccaccccaccgtctccttccgccacctcgacctctccttcaacgacttcaaggccctccccatctgcaaggagttcggcaacctctcccagctcaacttcctcggcctctccgccatgaagctccagaagctcgacctcctccccatcgcccacctccacctctcctacatcctcctcgacctccgcaactactacatcaaggagaacgagaccgagtccctccagatcctcaacgccaagaccctccacctcgtcttccaccccacctccctcttcgccatccaggtcaacatctccgtcaacaccctcggctgcctccagctcaccaacatcaagctcaacgacgacaactgccaggtcttcatcaagttcctctccgagctcacccgcggccccaccctcctcaacttcaccctcaaccacatcgagaccacctggaagtgcctcgtccgcgtcttccagttcctctggcccaagcccgtcgagtacctcaacatctacaacctcaccatcatcgagtccatccgcgaggaggacttcacctactccaagaccaccctcaaggccctcaccatcgagcacatcaccaaccaggtcttcctcttctcccagaccgccctctacaccgtcttctccgagatgaacatcatgatgctcaccatctccgacacccccttcatccacatgctctgcccccacgccccctccaccttcaagttcctcaacttcacccagaacgtcttcaccgactccatcttcgagaagtgctccaccctcgtcaagctcgagaccctcatcctccagaagaacggcctcaaggacctcttcaaggtcggcctcatgaccaaggacatgccctccctcgagatcctcgacgtctcctggaactccctcgagtccggccgccacaaggagaactgcacctgggtcgagtccatcgtcgtcctcaacctctcctccaacatgctcaccgactccgtcttccgctgcctccccccccgcatcaaggtcctcgacctccactccaacaagatcaagtccatccccaagcaggtcgtcaagctcgaggccctccaggagctcaacgtcgccttcaactccctcaccgacctccccggctgcggctccttctcctccctctccgtcctcatcatcgaccacaactccgtctcccacccctccgccgacttcttccagtcctgccagaagatgcgctccatcaaggccggcgacaaccccttccagtgcacctgcgagctccgcgagttcgtcaagaacatcgaccaggtctcctccgaggtcctcgagggctggcccgactcctacaagtgcgactaccccgagtcctaccgcggctcccccctcaaggacttccacatgtccgagctctcctgcaacatcaccctcctcatcgtcaccatcggcgccaccatgctcgtcctcgccgtcaccgtcacctccctctgcatctacctcgacctcccctggtacctccgcatggtctgccagtggacccagacccgccgccgcgcccgcaacatccccctcgaggagctccagcgcaacctccagttccacgccttcatctcctactccgagcacgactccgcctgggtcaagtccgagctcgtcccctacctcgagaaggaggacatccagatctgcctccacgagcgcaacttcgtccccggcaagtccatcgtcgagaacatcatcaactgcatcgagaagtcctacaagtccatcttcgtcctctcccccaacttcgtccagtccgagtggtgccactacgagctctacttcgcccaccacaacctcttccacgagggctccaacaacctcatcctcatcctcctcgagcccatcccccagaactccatccccaacaagtaccacaagctcaaggccctcatgatgcagcgcacctacctccagtggcccaaggagaagtccaagcgcggcctcttctgggccaacatccgcgccgccttcaacatgaagctcaccctcgtcaccgagaacaacgacgtcaagtcctga

SEQ ID NO: 9757 - RNA, 2391 nt, synthetic construct
  misc_feature 1..2391: note = derived and/or modified sequence opt3 fromTLR6__Homo_sapiens__AAY88762
  source 1..2391: mol_type = other RNA
atgaccaaggacaaagagcccatcgtgaagtccttccactttgtctgcctgatgattataatcgttggcacaaggattcagttctccgatgggaacgaatttgccgtggacaaatctaagagaggactcatccatgtacctaaagatcttccactgaagactaaggtgttggacatgtcacaaaattacattgctgagttacaggtcagtgatatgagcttcctgtccgaactaacggtgctccggctgtctcacaaccgcatccagcttctggacttgtcggtttttaaattcaatcaggatctcgagtatctggacctgtcacataaccaactccagaagataagctgtcacccgaccgtgagttttcgacatttagatctgtccttcaatgactttaaagcacttcccatctgcaaggagttcggtaacttgtctcagctgaattttctaggcctcagcgccatgaaactgcagaaacttgatctgttgcctattgcgcacctccacctgtcctacatcttactggacctccgtaactattacattaaggagaatgagacagaatcacttcaaatcctgaacgctaagactttgcatctagtcttccacccaaccagtctgtttgccatacaggtgaatattagcgtaaacacactcgggtgtctgcagcttaccaatatcaagctgaacgatgacaattgccaggttttcattaaattcttgtctgagctcactagaggacccacactgttaaactttaccctgaaccatatcgaaacgacttggaagtgtctagtgagggtcttccaatttctctggcctaaaccagtggagtatctgaatatctacaaccttaccattatagagtccatccgggaagaggacttcacatattcaaagactaccttgaaagcactgacaattgaacacatcaccaatcaggtgtttctcttcagccagacggccctgtacactgtctttagtgagatgaacataatgatgcttacaatttctgatacccccttcatccacatgctgtgccctcatgctccatccacttttaagttcttgaattttacacaaaacgttttcaccgacagcatctttgaaaagtgttcgacgctcgtgaaactggagaccttaattctgcagaagaatggcctaaaagatctcttcaaggtaggtctgatgacaaaagacatgccgtctcttgagatcttggatgtgtcctggaactcactggaaagtgggcgccacaaggagaattgcacttgggtcgaaagcattgtggttctcaacctgtcctctaatatgttaaccgacagcgtgttcagatgtctgccccctaggataaaggtccttgatttgcattcaaacaaaatcaagagtattccaaaacaggtggtaaagctcgaggcactgcaggaactaaatgttgcctttaactccctgacagacctccccggatgcggcagcttctcttcactgagtgtgcttatcatcgatcacaatagcgtctcccatccttctgctgactttttccaatcgtgtcagaaaatgcggagcattaaggccggcgataacccatttcagtgcacttgcgagttgcgcgagttcgtgaagaacatagaccaggtctcctcagaagtgctggaggggtggcccgacagttacaaatgtgattatccggaatcttaccgaggaagccctttaaaggactttcacatgtccgagctctcatgcaatatcaccctgcttattgttacaatcggtgcgaccatgctggtgttggcagtaactgtcacgagcctctgtatttatctggatctaccctggtacctgagaatggtgtgccaatggacacagaccaggcggcgtgcccgcaacatcccactcgaagaactgcagagaaatcttcagttccacgcttttatatcttattccgagcatgacagtgcctgggttaaaagcgaattggtgccttacctggagaaggaagatatccaaatttgtttacacgagaggaacttcgtccccggcaaatctatcgtggagaatattatcaactgcatagaaaagtcctataagtcaatttttgtactcagtccaaatttcgtgcagagcgagtggtgtcattacgaactgtactttgcacaccacaaccttttccatgaggggtcgaataacctgatcctaattctcctggaacccatccctcagaatagcataccaaacaaatatcacaagttgaaagctctgatgatgcagcggacttacttacaatggccgaaggagaaatctaagcgaggactcttctgggccaatatccgcgcggcctttaacatgaaactgacccttgttacagagaataacgacgtcaagagctga

SEQ ID NO: 9758 - RNA, 2391 nt, synthetic construct
  misc_feature 1..2391: note = derived and/or modified sequence opt4 fromTLR6__Homo_sapiens__AAY88762
  source 1..2391: mol_type = other RNA
atgaccaaggacaaggagcccatcgtgaagagcttccacttcgtgtgcctgatgatcatcatcgtgggcaccagaatccagttcagcgacggcaacgagttcgccgtggacaagagcaagagaggcctgatccacgtgcccaaggacctgcccctgaagaccaaggtgctggacatgagccagaactacatcgccgagctgcaggtgagcgacatgagcttcctgagcgagctgaccgtgctgagactgagccacaacagaatccagctgctggacctgagcgtgttcaagttcaaccaggacctggagtacctggacctgagccacaaccagctgcagaagatcagctgccaccccaccgtgagcttcagacacctggacctgagcttcaacgacttcaaggccctgcccatctgcaaggagttcggcaacctgagccagctgaacttcctgggcctgagcgccatgaagctgcagaagctggacctgctgcccatcgcccacctgcacctgagctacatcctgctggacctgagaaactactacatcaaggagaacgagaccgagagcctgcagatcctgaacgccaagaccctgcacctggtgttccaccccaccagcctgttcgccatccaggtgaacatcagcgtgaacaccctgggctgcctgcagctgaccaacatcaagctgaacgacgacaactgccaggtgttcatcaagttcctgagcgagctgaccagaggccccaccctgctgaacttcaccctgaaccacatcgagaccacctggaagtgcctggtgagagtgttccagttcctgtggcccaagcccgtggagtacctgaacatctacaacctgaccatcatcgagagcatcagagaggaggacttcacctacagcaagaccaccctgaaggccctgaccatcgagcacatcaccaaccaggtgttcctgttcagccagaccgccctgtacaccgtgttcagcgagatgaacatcatgatgctgaccatcagcgacacccccttcatccacatgctgtgcccccacgcccccagcaccttcaagttcctgaacttcacccagaacgtgttcaccgacagcatcttcgagaagtgcagcaccctggtgaagctggagaccctgatcctgcagaagaacggcctgaaggacctgttcaaggtgggcctgatgaccaaggacatgcccagcctggagatcctggacgtgagctggaacagcctggagagcggcagacacaaggagaactgcacctgggtggagagcatcgtggtgctgaacctgagcagcaacatgctgaccgacagcgtgttcagatgcctgccccccagaatcaaggtgctggacctgcacagcaacaagatcaagagcatccccaagcaggtggtgaagctggaggccctgcaggagctgaacgtggccttcaacagcctgaccgacctgcccggctgcggcagcttcagcagcctgagcgtgctgatcatcgaccacaacagcgtgagccaccccagcgccgacttcttccagagctgccagaagatgagaagcatcaaggccggcgacaaccccttccagtgcacctgcgagctgagagagttcgtgaagaacatcgaccaggtgagcagcgaggtgctggagggctggcccgacagctacaagtgcgactaccccgagagctacagaggcagccccctgaaggacttccacatgagcgagctgagctgcaacatcaccctgctgatcgtgaccatcggcgccaccatgctggtgctggccgtgaccgtgaccagcctgtgcatctacctggacctgccctggtacctgagaatggtgtgccagtggacccagaccagaagaagagccagaaacatccccctggaggagctgcagagaaacctgcagttccacgccttcatcagctacagcgagcacgacagcgcctgggtgaagagcgagctggtgccctacctggagaaggaggacatccagatctgcctgcacgagagaaacttcgtgcccggcaagagcatcgtggagaacatcatcaactgcatcgagaagagctacaagagcatcttcgtgctgagccccaacttcgtgcagagcgagtggtgccactacgagctgtacttcgcccaccacaacctgttccacgagggcagcaacaacctgatcctgatcctgctggagcccatcccccagaacagcatccccaacaagtaccacaagctgaaggccctgatgatgcagagaacctacctgcagtggcccaaggagaagagcaagagaggcctgttctgggccaacatcagagccgccttcaacatgaagctgaccctggtgaccgagaacaacgacgtgaagagctga

SEQ ID NO: 9759 - RNA, 2391 nt, synthetic construct
  misc_feature 1..2391: note = derived and/or modified sequence opt5 fromTLR6__Homo_sapiens__AAY88762
  source 1..2391: mol_type = other RNA
atgaccaaggacaaagagcccatcgtgaagtccttccactttgtgtgcctgatgattatcattgttggcacaagaatccagttctccgatgggaacgaatttgccgtggacaaatctaagcggggactcattcatgtgcctaaagatctgccgcttaagacgaaggtcctggacatgagccaaaattacatcgctgagctccaggtgtccgatatgtctttcctgagcgaacttaccgttctgcgcctctcccacaacagaatccagctgctggacctctctgtgtttaaattcaatcaggatctggagtatcttgacctgagccataaccaactccagaagatttcctgtcaccccacagtcagctttcggcatctggatctttctttcaatgactttaaagccctgcctatctgcaaggagttcggcaacctctcccagctgaattttctggggctcagcgcgatgaaactgcagaagctcgatctgctccccattgctcatctgcacctttcttacatcctgctcgacctgcgcaactattacattaaggagaatgagaccgaatccctgcaaatcctcaacgccaaaacactgcaccttgtgttccaccctaccagcctgtttgccattcaggttaatatctctgtgaacacactcggatgtctgcagcttaccaatatcaagctgaacgatgacaattgccaggtcttcattaaattcctctccgagctgacgagaggccccaccctgctcaactttacactgaaccatatcgaaaccacatggaagtgtcttgtgcgggtgttccaatttctgtggcctaaaccggtcgagtatctcaatatttacaacctgaccatcattgagagcatccgcgaagaggacttcacgtattccaagacaaccctgaaagctcttacaatcgaacacattaccaatcaggtttttctcttctctcagaccgccctgtacacagtgtttagcgagatgaacatcatgatgctgacgatttccgatacccccttcatccacatgctctgccctcatgctcccagcacatttaagttcctgaattttacccaaaacgtgttcacagactctatttttgaaaagtgttccacccttgtcaaactggagacgctcatcctgcagaagaatgggctgaaagatcttttcaaggtgggactcatgacaaaagacatgcctagcctggagatcctggatgtttcttggaacagcctcgaatccggcagacacaaggagaattgcacctgggtggaatctattgtcgtgctgaaccttagctccaatatgctgaccgacagcgttttccggtgtcttcccccgcgcatcaaggtgctggatctgcattctaacaaaattaagtccatccctaaacaggtcgtgaaacttgaggccctccaggaactgaatgtcgcgtttaacagcctgacagacctccccggctgcgggtctttctccagcctgtccgtgcttattatcgatcacaattctgttagccatccttccgccgactttttccaatcttgtcagaagatgagaagcattaaggctggagataacccctttcagtgtacctgcgagctgcgggagttcgtgaagaacatcgaccaggtctccagcgaagtgctcgagggctggcccgactcttacaaatgcgattatcctgaatcctaccgcgggagcccgctgaaggactttcacatgtctgagctgtcctgcaatatcacacttctcattgttacgatcggagccaccatgctggtgctggctgtcacagtgaccagcctctgtatttatctggatcttccctggtacctgagaatggtgtgccaatggacacagacccggcgcagagcccggaacatccctctcgaagaactgcagagaaatctgcagttccacgcgtttatttcttatagcgagcatgactccgcctgggttaaaagcgaacttgtcccctacctggagaaggaagatatccaaatctgtctccacgagcgcaacttcgtgcctggcaaatctattgtggagaatatcattaactgcatcgaaaagtcctataagagcatttttgtcctgtcccccaatttcgtgcagtctgagtggtgtcattacgaactctactttgctcaccacaacctgttccatgaggggagcaataaccttatcctgatcctcctggaaccgattcctcagaatagcatccccaacaaatatcacaagctgaaagcccttatgatgcagcggacgtacctgcaatggcctaaggagaaatctaagagaggactcttctgggctaatattcgcgccgcctttaacatgaaactgaccctcgttacagagaataacgacgtcaagagctga

SEQ ID NO: 9760 - protein, 1049 aa, synthetic construct
  REGION 1..1049: note = TLR7__Homo_sapiens__B2R9N9
MVFPMWTLKRQILILFNIILISKLLGARWFPKTLPCDVTLDVPKNHVIVDCTDKHLTEIPGGIPTNTTNLTLTINHIPDISPASFHRLDHLVEIDFRCNCVPIPLGSKNNMCIKRLQIKPRSFSGLTYLKSLYLDGNQLLEIPQGLPPSLQLLSLEANNIFSIRKENLTELANIEILYLGQNCYYRNPCYVSYSIEKDAFLNLTKLKVLSLKDNNVTAVPTVLPSTLTELYLYNNMIAKIQEDDFNNLNQLQILDLSGNCPRCYNAPFPCAPCKNNSPLQIPVNAFDALTELKVLRLHSNSLQHVPPRWFKNINKLQELDLSQNFLAKEIGDAKFLHFLPSLIQLDLSFNFELQVYRASMNLSQAFSSLKSLKILRIRGYVFKELKSFNLSPLHNLQNLEVLDLGTNFIKIANLSMFKQFKRLKVIDLSVNKISPSGDSSEVGFCSNARTSVESYEPQVLEQLHYFRYDKYARSCRFKNKEASFMSVNESCYKYGQTLDLSKNSIFFVKSSDFQHLSFLKCLNLSGNLISQTLNGSEFQPLAELRYLDFSNNRLDLLHSTAFEELHKLEVLDISSNSHYFQSEGITHMLNFTKNLKVLQKLMMNDNDISSSTSRTMESESLRTLEFRGNHLDVLWREGDNRYLQLFKNLLKLEELDISKNSLSFLPSGVFDGMPPNLKNLSLAKNGLKSFSWKKLQCLKNLETLDLSHNQLTTVPERLSNCSRSLKNLILKNNQIRSLTKYFLQDAFQLRYLDLSSNKIQMIQKTSFPENVLNNLKMLLLHHNRFLCTCDAVWFVWWVNHTEVTIPYLATDVTCVGPGAHKGQSVISLDLYTCELDLTNLILFSLSISVSLFLMVMMTASHLYFWDVWYIYHFCKAKIKGYQRLISPDCCYDAFIVYDTKDPAVTEWVLAELVAKLEDPREKHFNLCLEERDWLPGQPVLENLSQSIQLSKKTVFVMTDKYAKTENFKIAFYLSHQRLMDEKVDVIILIFLEKPFQKSKFLQLRKRLCGSSVLEWPTNPQAHPYFWQCLKNALATDNHVAYSQVFKETV

SEQ ID NO: 9761 - RNA, 3150 nt, synthetic construct
  misc_feature 1..3150: note = TLR7__Homo_sapiens__AAZ99022
  source 1..3150: mol_type = other RNA
atggtgtttccaatgtggacactgaagagacaaattcttatcctttttaacataatcctaatttccaaactccttggggctagatggtttcctaaaactctgccctgtgatgtcactctggatgttccaaagaaccatgtgatcgtggactgcacagacaagcatttgacagaaattcctggaggtattcccacgaacaccacgaacctcaccctcaccattaaccacataccagacatctccccagcgtcctttcacagactggaccatctggtagagatcgatttcagatgcaactgtgtacctattccactggggtcaaaaaacaacatgtgcatcaagaggctgcagattaaacccagaagctttagtggactcacttatttaaaatccctttacctggatggaaaccagctactagagataccgcagggcctcccgcctagcttacagcttctcagccttgaggccaacaacatcttttccatcagaaaagagaatctaacagaactggccaacatagaaatactctacctgggccaaaactgttattatcgaaatccttgttatgtttcatattcaatagagaaagatgccttcctaaacttgacaaagttaaaagtgctctccctgaaagataacaatgtcacagccgtccctactgttttgccatctactttaacagaactatatctctacaacaacatgattgcaaaaatccaagaagatgattttaataacctcaaccaattacaaattcttgacctaagtggaaattgccctcgttgttataatgccccatttccttgtgcgccgtgtaaaaataattctcccctacagatccctgtaaatgcttttgatgcgctgacagaattaaaagttttacgtctacacagtaactctcttcagcatgtgcccccaagatggtttaagaacatcaacaaactccaggaactggatctgtcccaaaacttcttggccaaagaaattggggatgctaaatttctgcattttctccccagcctcatccaattggatctgtctttcaattttgaacttcaggtctatcgtgcatctatgaatctatcacaagcattttcttcactgaaaagcctgaaaattctgcggatcagaggatatgtctttaaagagttgaaaagctttaacctctcgccattacataatcttcaaaatcttgaagttcttgatcttggcactaactttataaaaattgctaacctcagcatgtttaaacaatttaaaagactgaaagtcatagatctttcagtgaataaaatatcaccttcaggagattcaagtgaagttggcttctgctcaaatgccagaacttctgtagaaagttatgaaccccaggtcctggaacaattacattatttcagatatgataagtatgcaaggagttgcagattcaaaaacaaagaggcttctttcatgtctgttaatgaaagctgctacaagtatgggcagaccttggatctaagtaaaaatagtatattttttgtcaagtcctctgattttcagcatctttctttcctcaaatgcctgaatctgtcaggaaatctcattagccaaactcttaatggcagtgaattccaacctttagcagagctgagatatttggacttctccaacaaccggcttgatttactccattcaacagcatttgaagagcttcacaaactggaagttctggatataagcagtaatagccattattttcaatcagaaggaattactcatatgctaaactttaccaagaacctaaaggttctgcagaaactgatgatgaacgacaatgacatctcttcctccaccagcaggaccatggagagtgagtctcttagaactctggaattcagaggaaatcacttagatgttttatggagagaaggtgataacagatacttacaattattcaagaatctgctaaaattagaggaattagacatctctaaaaattccctaagtttcttgccttctggagtttttgatggtatgcctccaaatctaaagaatctctctttggccaaaaatgggctcaaatctttcagttggaagaaactccagtgtctaaagaacctggaaactttggacctcagccacaaccaactgaccactgtccctgagagattatccaactgttccagaagcctcaagaatctgattcttaagaataatcaaatcaggagtctgacgaagtattttctacaagatgccttccagttgcgatatctggatctcagctcaaataaaatccagatgatccaaaagaccagcttcccagaaaatgtcctcaacaatctgaagatgttgcttttgcatcataatcggtttctgtgcacctgtgatgctgtgtggtttgtctggtgggttaaccatacggaggtgactattccttacctggccacagatgtgacttgtgtggggccaggagcacacaagggccaaagtgtgatctccctggatctgtacacctgtgagttagatctgactaacctgattctgttctcactttccatatctgtatctctctttctcatggtgatgatgacagcaagtcacctctatttctgggatgtgtggtatatttaccatttctgtaaggccaagataaaggggtatcagcgtctaatatcaccagactgttgctatgatgcttttattgtgtatgacactaaagacccagctgtgaccgagtgggttttggctgagctggtggccaaactggaagacccaagagagaaacattttaatttatgtctcgaggaaagggactggttaccagggcagccagttctggaaaacctttcccagagcatacagcttagcaaaaagacagtgtttgtgatgacagacaagtatgcaaagactgaaaattttaagatagcattttacttgtcccatcagaggctcatggatgaaaaagttgatgtgattatcttgatatttcttgagaagccctttcagaagtccaagttcctccagctccggaaaaggctctgtgggagttctgtccttgagtggccaacaaacccgcaagctcacccatacttctggcagtgtctgaagaacgccctggccacagacaatcatgtggcctatagtcaggtgttcaaggaaacggtctag

SEQ ID NO: 9762 - RNA, 3150 nt, synthetic construct
  misc_feature 1..3150: note = derived and/or modified sequence opt1 fromTLR7__Homo_sapiens__AAZ99022
  source 1..3150: mol_type = other RNA
atggtgttccccatgtggaccctgaagcgccagatcctcatcctgttcaacatcatcctgatcagcaagctcctgggcgcccggtggttcccgaagaccctgccctgcgacgtcacgctcgacgtgcccaagaaccacgtgatcgtcgactgcaccgacaagcacctgaccgagatccccgggggcatcccgaccaacacgaccaacctgaccctcaccatcaaccacatccccgacatctcccccgccagcttccaccgcctggaccacctggtggagatcgacttccggtgcaactgcgtgcccatcccgctcgggtccaagaacaacatgtgcatcaagcgcctgcagatcaagccccggagcttctccggcctgacgtacctcaagagcctgtacctggacgggaaccagctcctggagatcccccagggcctgcccccgtccctccagctgctgagcctcgaggcgaacaacatcttctccatccgcaaggagaacctgaccgagctggccaacatcgagatcctctacctgggccagaactgctactaccggaacccctgctacgtcagctactccatcgagaaggacgccttcctgaacctcaccaagctgaaggtgctgagcctcaaggacaacaacgtgaccgccgtccccacggtgctgccctccaccctgaccgagctctacctgtacaacaacatgatcgccaagatccaggaggacgacttcaacaacctgaaccagctccagatcctggacctgagcgggaactgcccgcgctgctacaacgcgcccttcccctgcgccccctgcaagaacaactccccgctccagatccccgtgaacgccttcgacgccctgaccgagctgaaggtcctccggctgcacagcaactccctgcagcacgtgccgccccgctggttcaagaacatcaacaagctccaggagctggacctgagccagaacttcctggcgaaggagatcggcgacgccaagttcctccacttcctgccctccctgatccagctcgacctgagcttcaacttcgagctccaggtgtaccgggccagcatgaacctctcccaggccttcagctccctcaagagcctgaagatcctgcgcatccgggggtacgtcttcaaggagctgaagtccttcaacctgagccccctccacaacctgcagaacctggaggtgctcgacctgggcacgaacttcatcaagatcgccaacctgtccatgttcaagcagttcaagcgcctcaaggtgatcgacctgagcgtcaacaagatctcccccagcggggactccagcgaggtgggcttctgctccaacgcgcggaccagcgtggagtcctacgagccccaggtcctggagcagctccactacttccgctacgacaagtacgcccggagctgccgcttcaagaacaaggaggcctccttcatgagcgtgaacgagtcctgctacaagtacggccagaccctggacctgagcaagaacagcatcttcttcgtgaagtccagcgacttccagcacctctccttcctgaagtgcctgaacctcagcgggaacctgatctcccagaccctgaacggcagcgagttccagccgctcgccgagctgcggtacctggacttctccaacaaccgcctcgacctgctgcacagcacggccttcgaggagctccacaagctggaggtcctggacatctccagcaactcccactacttccagagcgaggggatcacccacatgctcaacttcaccaagaacctgaaggtgctgcagaagctcatgatgaacgacaacgacatctccagctccaccagccggacgatggagtccgagagcctgcgcaccctggagttccgcggcaaccacctcgacgtcctgtggcgggagggcgacaaccgctacctgcagctgttcaagaacctgctgaagctcgaggagctggacatcagcaagaactccctgagcttcctcccctccggggtgttcgacggcatgcccccgaacctgaagaacctgagcctcgcgaagaacgggctgaagtccttcagctggaagaagctgcagtgcctcaagaacctggagaccctggacctctcccacaaccagctgaccacggtgcccgagcggctgagcaactgctcccgcagcctcaagaacctgatcctgaagaacaaccagatccggtccctcaccaagtacttcctgcaggacgccttccagctgcgctacctcgacctgagctccaacaagatccagatgatccagaagaccagcttccccgagaacgtcctgaacaacctcaagatgctgctgctccaccacaaccggttcctgtgcacgtgcgacgccgtgtggttcgtgtggtgggtcaaccacaccgaggtgaccatcccctacctggccaccgacgtgacctgcgtcggcccgggggcccacaagggccagtccgtgatcagcctcgacctgtacacgtgcgagctggacctcaccaacctgatcctgttctccctcagcatctccgtgagcctgttcctgatggtcatgatgaccgcgagccacctctacttctgggacgtgtggtacatctaccacttctgcaaggccaagatcaagggctaccagcgcctgatctcccccgactgctgctacgacgccttcatcgtgtacgacaccaaggaccccgccgtcaccgagtgggtgctggccgagctcgtggcgaagctggaggacccccgggagaagcacttcaacctgtgcctggaggagcgcgactggctcccggggcagcccgtcctggagaacctgagccagtccatccagctcagcaagaagacggtgttcgtgatgaccgacaagtacgccaagaccgagaacttcaagatcgccttctacctgtcccaccagcggctgatggacgagaaggtcgacgtgatcatcctcatcttcctggagaagcccttccagaagtccaagttcctgcagctccgcaagcggctgtgcggcagcagcgtgctggagtggcccaccaacccgcaggcccacccctacttctggcagtgcctcaagaacgcgctggccacggacaaccacgtcgcctactcccaggtgttcaaggagaccgtgtga

SEQ ID NO: 9763 - RNA, 3150 nt, synthetic construct
  misc_feature 1..3150: note = derived and/or modified sequence opt2 fromTLR7__Homo_sapiens__AAZ99022
  source 1..3150: mol_type = other RNA
atggtcttccccatgtggaccctcaagcgccagatcctcatcctcttcaacatcatcctcatctccaagctcctcggcgcccgctggttccccaagaccctcccctgcgacgtcaccctcgacgtccccaagaaccacgtcatcgtcgactgcaccgacaagcacctcaccgagatccccggcggcatccccaccaacaccaccaacctcaccctcaccatcaaccacatccccgacatctcccccgcctccttccaccgcctcgaccacctcgtcgagatcgacttccgctgcaactgcgtccccatccccctcggctccaagaacaacatgtgcatcaagcgcctccagatcaagccccgctccttctccggcctcacctacctcaagtccctctacctcgacggcaaccagctcctcgagatcccccagggcctccccccctccctccagctcctctccctcgaggccaacaacatcttctccatccgcaaggagaacctcaccgagctcgccaacatcgagatcctctacctcggccagaactgctactaccgcaacccctgctacgtctcctactccatcgagaaggacgccttcctcaacctcaccaagctcaaggtcctctccctcaaggacaacaacgtcaccgccgtccccaccgtcctcccctccaccctcaccgagctctacctctacaacaacatgatcgccaagatccaggaggacgacttcaacaacctcaaccagctccagatcctcgacctctccggcaactgcccccgctgctacaacgcccccttcccctgcgccccctgcaagaacaactcccccctccagatccccgtcaacgccttcgacgccctcaccgagctcaaggtcctccgcctccactccaactccctccagcacgtccccccccgctggttcaagaacatcaacaagctccaggagctcgacctctcccagaacttcctcgccaaggagatcggcgacgccaagttcctccacttcctcccctccctcatccagctcgacctctccttcaacttcgagctccaggtctaccgcgcctccatgaacctctcccaggccttctcctccctcaagtccctcaagatcctccgcatccgcggctacgtcttcaaggagctcaagtccttcaacctctcccccctccacaacctccagaacctcgaggtcctcgacctcggcaccaacttcatcaagatcgccaacctctccatgttcaagcagttcaagcgcctcaaggtcatcgacctctccgtcaacaagatctccccctccggcgactcctccgaggtcggcttctgctccaacgcccgcacctccgtcgagtcctacgagccccaggtcctcgagcagctccactacttccgctacgacaagtacgcccgctcctgccgcttcaagaacaaggaggcctccttcatgtccgtcaacgagtcctgctacaagtacggccagaccctcgacctctccaagaactccatcttcttcgtcaagtcctccgacttccagcacctctccttcctcaagtgcctcaacctctccggcaacctcatctcccagaccctcaacggctccgagttccagcccctcgccgagctccgctacctcgacttctccaacaaccgcctcgacctcctccactccaccgccttcgaggagctccacaagctcgaggtcctcgacatctcctccaactcccactacttccagtccgagggcatcacccacatgctcaacttcaccaagaacctcaaggtcctccagaagctcatgatgaacgacaacgacatctcctcctccacctcccgcaccatggagtccgagtccctccgcaccctcgagttccgcggcaaccacctcgacgtcctctggcgcgagggcgacaaccgctacctccagctcttcaagaacctcctcaagctcgaggagctcgacatctccaagaactccctctccttcctcccctccggcgtcttcgacggcatgccccccaacctcaagaacctctccctcgccaagaacggcctcaagtccttctcctggaagaagctccagtgcctcaagaacctcgagaccctcgacctctcccacaaccagctcaccaccgtccccgagcgcctctccaactgctcccgctccctcaagaacctcatcctcaagaacaaccagatccgctccctcaccaagtacttcctccaggacgccttccagctccgctacctcgacctctcctccaacaagatccagatgatccagaagacctccttccccgagaacgtcctcaacaacctcaagatgctcctcctccaccacaaccgcttcctctgcacctgcgacgccgtctggttcgtctggtgggtcaaccacaccgaggtcaccatcccctacctcgccaccgacgtcacctgcgtcggccccggcgcccacaagggccagtccgtcatctccctcgacctctacacctgcgagctcgacctcaccaacctcatcctcttctccctctccatctccgtctccctcttcctcatggtcatgatgaccgcctcccacctctacttctgggacgtctggtacatctaccacttctgcaaggccaagatcaagggctaccagcgcctcatctcccccgactgctgctacgacgccttcatcgtctacgacaccaaggaccccgccgtcaccgagtgggtcctcgccgagctcgtcgccaagctcgaggacccccgcgagaagcacttcaacctctgcctcgaggagcgcgactggctccccggccagcccgtcctcgagaacctctcccagtccatccagctctccaagaagaccgtcttcgtcatgaccgacaagtacgccaagaccgagaacttcaagatcgccttctacctctcccaccagcgcctcatggacgagaaggtcgacgtcatcatcctcatcttcctcgagaagcccttccagaagtccaagttcctccagctccgcaagcgcctctgcggctcctccgtcctcgagtggcccaccaacccccaggcccacccctacttctggcagtgcctcaagaacgccctcgccaccgacaaccacgtcgcctactcccaggtcttcaaggagaccgtctga

SEQ ID NO: 9764 - RNA, 3150 nt, synthetic construct
  misc_feature 1..3150: note = derived and/or modified sequence opt3 fromTLR7__Homo_sapiens__AAZ99022
  source 1..3150: mol_type = other RNA
atggtgttccccatgtggaccctgaagagacagatcctcattctttttaacataatcctgattagcaaattgttaggcgccaggtggttccctaagacactgccatgcgacgtcactctagatgttccgaaaaatcacgtgatcgtagactgtacggataagcatctcaccgagattcccgggggaatccctacaaacactaccaatctgacacttaccataaaccacatcccagacatttcccccgcttcttttcatcggctggatcacttggtggaaatcgacttccgctgcaattgtgtccctattccactcggtagcaaaaacaatatgtgcatcaagcgactgcaaataaagccccgtagttttagcggcctgacttacctcaaatccttatatctggatgggaaccagcttttggagattcctcagggactgccaccgtctctacagctcctgtcgcttgaagcaaataacatcttctcaattagaaaggagaatctgacagaattggccaacatcgagatcctctacctgggccaaaattgttattacaggaacccctgctatgtgagctacagtattgagaaagacgcgtttttaaatctgaccaagctcaaagttctttccctgaaggataacaacgtgacggctgtccctactgtgttgccatctaccctaacagaactgtatctctacaataacatgatagccaagatccaggaggacgatttcaataacctgaatcagcttcagattctggacttgagcggtaactgtccccggtgctacaatgcaccttttccatgtgccccctgcaaaaacaattccccgctccaaatccctgtaaacgctttcgatgcactgactgaattaaaggttctgcgcctacattcaaatagtctccagcacgtgcccccaagatggtttaaaaacataaataagctgcaggagcttgacttgagccagaacttcctggccaaagagattggggacgctaagtttctccacttcctgccttctcttatccaactggatttgtccttcaattttgaactccaggtctatagggcctcaatgaacctgagccaggcgttcagttctttaaaatccctgaagatcctacggattcgcggatacgtgtttaaggagctcaaatcattcaacctgtcgccccttcataatttgcaaaacctggaagtgctcgacctgggcaccaattttatcaagattgcaaacttatctatgttcaaacagtttaagcgactgaaagtcatagatctttccgttaataagatctcaccaagtggcgacagctccgaggtggggttctgttctaacgccagaacaagcgtagaatcatatgagccccaggtgttggagcagctccactactttaggtatgataagtacgctcggagttgccgtttcaaaaataaggaagcctcctttatgagcgtcaacgagtcttgctataaatacggacaaaccctggacctatcaaagaatagtattttctttgtgaaaagctccgatttccagcatctgtctttcctcaagtgtctgaacctttcgggtaatttgatcagccagacgctgaacggctccgaatttcagcctttagcagagctccgctacctggacttctcaaataacagacttgatctgttgcacagtactgcttttgaagaactccacaagctggaggttctagacatctctagcaattcccattatttccaatcagaagggattacacacatgctgaactttaccaaaaacctcaaggtgctgcagaaacttatgatgaatgataacgacataagttcttccactagcaggacaatggagagcgaatctttgcggaccctggagttccgaggaaatcatttagacgtcctctggcgcgaaggcgataacagatacctgcagctttttaagaatctgctaaaactcgaggagctggacatctccaagaactcattgagtttcctgccaagcggtgtgtttgatgggatgccgcccaatttaaagaacctctcgctggccaaaaatggacttaagtccttctcttggaaaaagctgcagtgcttgaaaaacctcgaaacgctggacctaagccacaatcaactgaccacagtacctgagaggctttcaaactgtagtcggtccctcaagaatctgattttgaaaaacaatcagatccgctctctgactaagtactttttacaggatgcgttccagctcagatatctggaccttagctccaacaagattcaaatgatccagaaaacctcatttccagaaaacgttctgaataacttgaagatgctcctgctacatcacaataggttcctgtgcacatgtgatgccgtgtggttcgtctggtgggtgaaccacactgaggtcaccataccctatcttgcaacagacgtgacctgcgttggccctggcgctcataaagggcagagcgtgatcagtctcgatctgtacacttgtgagttggacttaacgaatctgattctcttttctctgtccatcagcgtatcgcttttcctgatggtcatgatgacagcctcacacttgtatttttgggatgtgtggtacatttaccatttctgcaaggctaaaatcaagggatatcaacgtctaatatctccagactgttgctacgatgcctttattgtttatgacaccaaggaccccgcagtgactgaatgggtcctggccgagctcgtggctaaactggaagatccgcgggagaagcacttcaacctttgtttagaggagcgagactggctgcctggtcagccagtactcgagaatttgagtcagtccatccagctgagcaaaaagaccgtgtttgttatgacagataaatacgcgaagaccgaaaacttcaagattgcattttatctctctcaccaaagactgatggacgagaaagtcgatgtgatcatacttatcttcctggaaaagccctttcagaaaagcaagttcttgcagctaaggaaacgcctgtgcggctcctcagtgctcgagtggcctactaatccccaggcccatccatacttctggcaatgcttaaagaacgctctggccacagacaatcacgtcgcatatagtcaggtttttaaggaaacggtgtga

SEQ ID NO: 9765 - RNA, 3150 nt, synthetic construct
  misc_feature 1..3150: note = derived and/or modified sequence opt4 fromTLR7__Homo_sapiens__AAZ99022
  source 1..3150: mol_type = other RNA
atggtgttccccatgtggaccctgaagagacagatcctgatcctgttcaacatcatcctgatcagcaagctgctgggcgccagatggttccccaagaccctgccctgcgacgtgaccctggacgtgcccaagaaccacgtgatcgtggactgcaccgacaagcacctgaccgagatccccggcggcatccccaccaacaccaccaacctgaccctgaccatcaaccacatccccgacatcagccccgccagcttccacagactggaccacctggtggagatcgacttcagatgcaactgcgtgcccatccccctgggcagcaagaacaacatgtgcatcaagagactgcagatcaagcccagaagcttcagcggcctgacctacctgaagagcctgtacctggacggcaaccagctgctggagatcccccagggcctgccccccagcctgcagctgctgagcctggaggccaacaacatcttcagcatcagaaaggagaacctgaccgagctggccaacatcgagatcctgtacctgggccagaactgctactacagaaacccctgctacgtgagctacagcatcgagaaggacgccttcctgaacctgaccaagctgaaggtgctgagcctgaaggacaacaacgtgaccgccgtgcccaccgtgctgcccagcaccctgaccgagctgtacctgtacaacaacatgatcgccaagatccaggaggacgacttcaacaacctgaaccagctgcagatcctggacctgagcggcaactgccccagatgctacaacgcccccttcccctgcgccccctgcaagaacaacagccccctgcagatccccgtgaacgccttcgacgccctgaccgagctgaaggtgctgagactgcacagcaacagcctgcagcacgtgccccccagatggttcaagaacatcaacaagctgcaggagctggacctgagccagaacttcctggccaaggagatcggcgacgccaagttcctgcacttcctgcccagcctgatccagctggacctgagcttcaacttcgagctgcaggtgtacagagccagcatgaacctgagccaggccttcagcagcctgaagagcctgaagatcctgagaatcagaggctacgtgttcaaggagctgaagagcttcaacctgagccccctgcacaacctgcagaacctggaggtgctggacctgggcaccaacttcatcaagatcgccaacctgagcatgttcaagcagttcaagagactgaaggtgatcgacctgagcgtgaacaagatcagccccagcggcgacagcagcgaggtgggcttctgcagcaacgccagaaccagcgtggagagctacgagccccaggtgctggagcagctgcactacttcagatacgacaagtacgccagaagctgcagattcaagaacaaggaggccagcttcatgagcgtgaacgagagctgctacaagtacggccagaccctggacctgagcaagaacagcatcttcttcgtgaagagcagcgacttccagcacctgagcttcctgaagtgcctgaacctgagcggcaacctgatcagccagaccctgaacggcagcgagttccagcccctggccgagctgagatacctggacttcagcaacaacagactggacctgctgcacagcaccgccttcgaggagctgcacaagctggaggtgctggacatcagcagcaacagccactacttccagagcgagggcatcacccacatgctgaacttcaccaagaacctgaaggtgctgcagaagctgatgatgaacgacaacgacatcagcagcagcaccagcagaaccatggagagcgagagcctgagaaccctggagttcagaggcaaccacctggacgtgctgtggagagagggcgacaacagatacctgcagctgttcaagaacctgctgaagctggaggagctggacatcagcaagaacagcctgagcttcctgcccagcggcgtgttcgacggcatgccccccaacctgaagaacctgagcctggccaagaacggcctgaagagcttcagctggaagaagctgcagtgcctgaagaacctggagaccctggacctgagccacaaccagctgaccaccgtgcccgagagactgagcaactgcagcagaagcctgaagaacctgatcctgaagaacaaccagatcagaagcctgaccaagtacttcctgcaggacgccttccagctgagatacctggacctgagcagcaacaagatccagatgatccagaagaccagcttccccgagaacgtgctgaacaacctgaagatgctgctgctgcaccacaacagattcctgtgcacctgcgacgccgtgtggttcgtgtggtgggtgaaccacaccgaggtgaccatcccctacctggccaccgacgtgacctgcgtgggccccggcgcccacaagggccagagcgtgatcagcctggacctgtacacctgcgagctggacctgaccaacctgatcctgttcagcctgagcatcagcgtgagcctgttcctgatggtgatgatgaccgccagccacctgtacttctgggacgtgtggtacatctaccacttctgcaaggccaagatcaagggctaccagagactgatcagccccgactgctgctacgacgccttcatcgtgtacgacaccaaggaccccgccgtgaccgagtgggtgctggccgagctggtggccaagctggaggaccccagagagaagcacttcaacctgtgcctggaggagagagactggctgcccggccagcccgtgctggagaacctgagccagagcatccagctgagcaagaagaccgtgttcgtgatgaccgacaagtacgccaagaccgagaacttcaagatcgccttctacctgagccaccagagactgatggacgagaaggtggacgtgatcatcctgatcttcctggagaagcccttccagaagagcaagttcctgcagctgagaaagagactgtgcggcagcagcgtgctggagtggcccaccaacccccaggcccacccctacttctggcagtgcctgaagaacgccctggccaccgacaaccacgtggcctacagccaggtgttcaaggagaccgtgtga

SEQ ID NO: 9766 - RNA, 3150 nt, synthetic construct
  misc_feature 1..3150: note = derived and/or modified sequence opt5 fromTLR7__Homo_sapiens__AAZ99022
  source 1..3150: mol_type = other RNA
atggtgttccccatgtggaccctgaagagacagatcctcattctgtttaacatcattcttatcagcaaactgctcggcgcccggtggttccctaagacactgccgtgcgacgtcacgcttgatgttcccaaaaatcacgtgattgtggactgtaccgataagcatctgacagagatccctgggggaatccccaccaacacaaccaatctcacactgaccattaaccacatccctgacatttcccccgcttcttttcatcgcctggatcacctcgtcgaaatcgacttcagatgcaattgtgtgcctattccgctgggcagcaaaaacaatatgtgcatcaagcggcttcaaattaagccccgctccttttctgggctgacgtacctcaaaagcctgtatcttgatggaaaccagctgctcgagatccctcagggcctgcccccttccctgcagctcctgtctcttgaagccaataacatcttcagcattagaaaggagaatctgaccgaactcgcgaacatcgagattctgtaccttgggcaaaattgttattaccggaacccctgctatgtttcctacagcatcgagaaagacgcttttctgaatctcacaaagctgaaagtgctgtctctcaaggataacaacgtcaccgccgtgccgacagttctgccttccacccttacggaactgtatctctacaataacatgattgccaagatccaggaggacgatttcaataacctgaatcagcttcagatcctggacctcagcggaaactgtccccgctgctacaatgctccttttccctgtgccccctgcaaaaacaattctcctctgcaaattccggtgaacgctttcgatgccctgacagaactcaaggtcctgagacttcattccaatagcctgcagcacgtgccccctcggtggtttaaaaacatcaataagctccaggagctggacctgtctcagaacttccttgcgaaagagattggcgacgccaagtttctccacttcctgccctccctgatccaactcgatctgagcttcaattttgaacttcaggtgtatcgcgcttccatgaacctgtctcaggccttcagctccctcaaaagcctgaagattctgagaatccggggctacgtctttaaggagcttaaatctttcaacctctcccctctgcataatctgcaaaacctcgaagttctggaccttgggaccaattttatcaagattgctaacctgagcatgttcaaacagtttaagcgcctcaaagtgatcgatctgtctgtgaataagattagcccctccggagactctagcgaggtcggcttctgttccaacgccagaacaagcgtggaatcttatgagccgcaggttctggagcagcttcactactttcggtatgataagtacgcgcgctcctgcagattcaaaaataaggaagccagctttatgtctgtgaacgagtcctgctataaatacgggcaaaccctcgacctgagcaaaaattccatcttctttgtcaagtctagcgatttccagcatctgtccttcctcaagtgtctgaacctttctggaaatctgattagccagaccctcaacggctccgaatttcagcctctggctgagctgcggtaccttgacttcagcaataacagactcgatctgctgcactctacagcctttgaagaactccacaagctggaggtgcttgacatctccagcaattctcattatttccaatccgaagggattacgcacatgctgaactttaccaaaaacctcaaggttctgcagaaactgatgatgaatgataacgacatcagctctagcacatcccgcaccatggagagcgaatctcttcggacactggagttcagaggaaatcatctcgacgtgctgtggcgcgaaggcgataaccggtacctccagctgtttaagaatcttctgaaactcgaggagctggacatctccaagaacagcctgtccttccttccctctggcgtctttgatgggatgcctcccaatctgaagaacctcagcctggctaaaaatggactcaagtccttctcttggaaaaagctgcagtgccttaaaaacctggaaaccctcgacctgagccacaatcaactgacgacagtgcctgagagactttccaactgttctcgcagcctgaagaatctcattctgaaaaacaatcagatccggtccctcaccaagtattttctgcaggatgccttccagcttagatacctggacctgagctctaacaagattcaaatgatccagaaaacctcctttcccgaaaacgtcctcaataacctgaagatgcttctgctccatcacaatcgcttcctgtgcacatgtgatgccgtgtggttcgtttggtgggtgaaccacaccgaggtcacaattccgtatctcgctacggacgtgacctgcgttggccctggggcgcataaaggacagagcgtgatctctctggatctttacacatgtgagctggacctgaccaatctcatcctgttttcccttagcatttctgtctccctgttcctcatggtgatgatgacagccagccacctgtatttttgggatgtgtggtacatctaccatttctgcaaggctaaaattaagggctatcaacggctcatctcccccgactgttgctacgatgcctttattgtttatgacaccaaggaccccgccgtcacggaatgggtgctggctgagcttgtggccaaactggaagatcctagagagaagcacttcaacctgtgtctcgaggagcgcgactggctgccggggcagcccgtccttgagaatctgagccagtctatccagctcagcaaaaagaccgtgtttgttatgacagataaatacgcgaagaccgaaaacttcaagatcgctttttatctgtcccaccaacggctcatggacgagaaagtggatgtcattatcctgattttccttgaaaagccttttcagaaatctaagttcctgcagctgagaaaacggctctgcggaagctccgtgctggagtggcccacaaatcctcaggcccatccctacttctggcaatgccttaagaacgccctggctaccgacaatcacgttgcctattctcaggtgtttaaggaaacggtctga

SEQ ID NO: 9767 - protein, 1049 aa, synthetic construct [sequence omitted]

SEQ ID NO: 9768 - RNA, 3150 nt, synthetic construct
  misc_feature 1..3150: note = TLR7__Homo_sapiens__AAZ99025
  source 1..3150: mol_type = other RNA
atggtgtttccaatgtggacactgaagagactaattcttatcctttttaacataatcctaatttccaaactccttggggctagatggtttcctaaaactctgccctgtgatgtcactctggatgttccaaagaaccatgtgatcgtggactgcacagacaagcatttgacagaaattcctggaggtattcccacgaacaccacgaacctcaccctcaccattaaccacataccagacatctccccagcgtcctttcacagactggaccatctggtagagatcgatttcagatgcaactgtgtacctattccactggggtcaaaaaacaacatgtgcatcaagaggctgcagattaaacccagaagctttagtggactcacttatttaaaatccctttacctggatggaaaccagctactagagataccgcagggcctcccgcctagcttacagcttctcagccttgaggccaacaacatcttttccatcagaaaagagaatctaacagaactggccaacatagaaatactctacctgggccaaaactgttattatcgaaatccttgttatgtttcatattcaatagagaaagatgccttcctaaacttgacaaagttaaaagtgctctccctgaaagataacaatgtcacagccgtccctactgttttgccatctactttaacagaactatatctctacaacaacatgattgcaaaaatccaagaagatgattttaataacctcaaccaattacaaattcttgacctaagtggaaattgccctcgttgttataatgccccatttccttgtgcgccgtgtaaaaataattctcccctacagatccctgtaaatgcttttgatgcgctgacagaattaaaagttttacgtctacacagtaactctcttcagcatgtgcccccaagatggtttaagaacatcaacaaactccaggaactggatctgtcccaaaacttcttggccaaagaaattggggatgctaaatttctgcattttctccccagcctcatccaattggatctgtctttcaattttgaacttcaggtctatcgtgcatctatgaatctatcacaagcattttcttcactgaaaagcctgaaaattctgcggatcagaggatatgtctttaaagagttgaaaagctttaacctctcgccattacataatcttcaaaatcttgaagttcttgatcttggcactaactttataaaaattgctaacctcagcatgtttaaacaatttaaaagactgaaagtcatagatctttcagtgaataaaatatcaccttcaggagattcaagtgaagttggcttctgctcaaatgtcagaacttctgtagaaagttatgaaccccaggtcctggaacaattacattatttcagatatgataagtatgcaaggagttgcagattcaaaaacaaagaggcttctttcatgtctgttaatgaaagctgctacaagtatgggcagaccttggatctaagtaaaaatagtatattttttgtcaagtcctctgattttcagcatctttctttcctcaaatgcctgaatctgtcaggaaatctcattagccaaactcttaatggcagtgaattccaacctttagcagagctgagatatttggacttctccaacaaccggcttgatttactccattcaacagcatttgaagagcttcacaaactggaagttctggatataagcagtaatagccattattttcaatcagaaggaattactcatatgctaaactttaccaagaacctaaaggttctgcagaaactgatgatgaacgacaatgacatctcttcctccaccagcaggaccatggagagtgagtctcttagaactctggaattcagaggaaatcacttagatgttttatggagagaaggtgataacagatacttacaattattcaagaatctgctaaaattagaggaattagacatctctaaaaattccctaagtttcttgccttctggagtttttgatggtatgcctccaaatctaaagaatctctctttggccaaaaatgggctcaaatctttcagttggaagaaactccagtgtctaaagaacctggaaactttggacctcagccacaaccaactgaccactgtccctgagagattatccaactgttccagaagcctcaagaatctgattcttaagaataatcaaatcaggagtctgacgaagtattttctacaagatgccttccagttgcgatatctggatctcagctcaaataaaatccagatgatccaaaagaccagcttcccagaaaatgtcctcaacaatctgaagatgttgcttttgcatcataatcggtttctgtgcacctgtgatgctgtgtggtttgtctggtgggttaaccatacggaggtgactattccttacctggccacagatgtgacttgtgtggggccaggagcacacaagggccaaagtgtgatctccctggatctgtacacctgtgagttagatctgactaacctgattctgttctcactttccatatctgtatctctctttctcatggtgatgatgacagcaagtcacctctatttctgggatgtgtggtatatttaccatttctgtaaggccaagataaaggggtatcagcgtctaatatcaccagactgttgctatgatgcttttattgtgtatgacactaaagacccagctgtgaccgagtgggttttggctgagctggtggccaaactggaagacccaagagagaaacattttaatttatgtctcgaggaaagggactggttaccagggcagccagttctggaaaacctttcccagagcatacagcttagcaaaaagacagtgtttgtgatgacagacaagtatgcaaagactgaaaattttaagatagcattttacttgtcccatcagaggctcatggatgaaaaagttgatgtgattatcttgatatttcttgagaagccctttcagaagtccaagttcctccagctccggaaaaggctctgtgggagttctgtccttgagtggccaacaaacccgcaagctcacccatacttctggcagtgtctaaagaacgccctggccacagacaatcatgtggcctatagtcaggtgttcaaggaaacggtctag

SEQ ID NO: 9769 - RNA, 3150 nt, synthetic construct
  misc_feature 1..3150: note = derived and/or modified sequence opt1 fromTLR7__Homo_sapiens__AAZ99025
  source 1..3150: mol_type = other RNA
atggtgttccccatgtggaccctgaagcgcctcatcctgatcctgttcaacatcatcctcatcagcaagctgctgggcgcccggtggttcccgaagaccctcccctgcgacgtcacgctggacgtgcccaagaaccacgtgatcgtcgactgcaccgacaagcacctgaccgagatccccgggggcatcccgaccaacacgaccaacctcaccctgaccatcaaccacatccccgacatctcccccgccagcttccaccgcctggaccacctcgtggagatcgacttccggtgcaactgcgtgcccatcccgctggggtccaagaacaacatgtgcatcaagcgcctgcagatcaagccccggagcttctccggcctcacgtacctcaagagcctgtacctcgacgggaaccagctgctggagatcccccagggcctgcccccgtccctgcagctgctcagcctggaggcgaacaacatcttctccatccgcaaggagaacctgaccgagctcgccaacatcgagatcctgtacctgggccagaactgctactaccggaacccctgctacgtcagctactccatcgagaaggacgccttcctcaacctgaccaagctgaaggtgctcagcctgaaggacaacaacgtgaccgccgtccccacggtgctgccctccaccctcaccgagctgtacctgtacaacaacatgatcgccaagatccaggaggacgacttcaacaacctcaaccagctgcagatcctggacctcagcgggaactgcccgcgctgctacaacgcgcccttcccctgcgccccctgcaagaacaactccccgctgcagatccccgtgaacgccttcgacgccctgaccgagctcaaggtcctgcggctgcacagcaactccctccagcacgtgccgccccgctggttcaagaacatcaacaagctgcaggagctggacctgagccagaacttcctcgcgaaggagatcggcgacgccaagttcctgcacttcctgccctccctcatccagctggacctgagcttcaacttcgagctccaggtgtaccgggccagcatgaacctgtcccaggccttcagctccctcaagagcctgaagatcctgcgcatccgggggtacgtcttcaaggagctgaagtccttcaacctcagccccctgcacaacctgcagaacctcgaggtgctggacctgggcacgaacttcatcaagatcgccaacctctccatgttcaagcagttcaagcgcctgaaggtgatcgacctgagcgtcaacaagatctcccccagcggggactccagcgaggtgggcttctgctccaacgtgcggaccagcgtcgagtcctacgagccccaggtgctcgagcagctgcactacttccgctacgacaagtacgcgcggagctgccgcttcaagaacaaggaggcctccttcatgagcgtgaacgagtcctgctacaagtacggccagaccctggacctcagcaagaacagcatcttcttcgtcaagtccagcgacttccagcacctgtccttcctgaagtgcctcaacctgagcgggaacctgatctcccagaccctcaacggcagcgagttccagccgctggccgagctgcggtacctcgacttctccaacaaccgcctggacctgctccacagcacggccttcgaggagctgcacaagctggaggtgctcgacatctccagcaactcccactacttccagagcgaggggatcacccacatgctgaacttcaccaagaacctgaaggtcctccagaagctgatgatgaacgacaacgacatctccagctccaccagccggacgatggagtccgagagcctgcgcaccctcgagttccgcggcaaccacctggacgtgctgtggcgggagggcgacaaccgctacctccagctgttcaagaacctgctcaagctggaggagctggacatcagcaagaactccctcagcttcctgccctccggggtgttcgacggcatgcccccgaacctgaagaacctcagcctggccaagaacgggctgaagtccttcagctggaagaagctccagtgcctgaagaacctggagaccctcgacctgtcccacaaccagctgaccacggtccccgagcggctcagcaactgctcccgcagcctgaagaacctgatcctcaagaacaaccagatccggtccctgaccaagtacttcctgcaggacgcgttccagctccgctacctggacctgagctccaacaagatccagatgatccagaagaccagcttccccgagaacgtgctcaacaacctgaagatgctgctcctgcaccacaaccggttcctgtgcacgtgcgacgccgtgtggttcgtctggtgggtgaaccacaccgaggtgaccatcccctacctcgccaccgacgtgacctgcgtcggcccgggggcccacaagggccagtccgtgatcagcctggacctgtacacgtgcgagctcgacctgaccaacctgatcctcttctccctgagcatctccgtcagcctgttcctcatggtgatgatgaccgccagccacctgtacttctgggacgtgtggtacatctaccacttctgcaaggcgaagatcaagggctaccagcgcctgatctcccccgactgctgctacgacgccttcatcgtctacgacaccaaggaccccgccgtgaccgagtgggtgctcgccgagctggtcgccaagctggaggacccccgggagaagcacttcaacctgtgcctcgaggagcgcgactggctgccggggcagcccgtgctggagaacctcagccagtccatccagctgagcaagaagacggtgttcgtcatgaccgacaagtacgcgaagaccgagaacttcaagatcgccttctacctgtcccaccagcggctcatggacgagaaggtggacgtgatcatcctgatcttcctggagaagcccttccagaagtccaagttcctccagctgcgcaagcggctgtgcggcagcagcgtcctcgagtggcccaccaacccgcaggcccacccctacttctggcagtgcctgaagaacgccctggcgacggacaaccacgtggcctactcccaggtgttcaaggagaccgtctga

SEQ ID NO: 9770 - RNA, 3150 nt, synthetic construct
  misc_feature 1..3150: note = derived and/or modified sequence opt2 fromTLR7__Homo_sapiens__AAZ99025
  source 1..3150: mol_type = other RNA
atggtcttccccatgtggaccctcaagcgcctcatcctcatcctcttcaacatcatcctcatctccaagctcctcggcgcccgctggttccccaagaccctcccctgcgacgtcaccctcgacgtccccaagaaccacgtcatcgtcgactgcaccgacaagcacctcaccgagatccccggcggcatccccaccaacaccaccaacctcaccctcaccatcaaccacatccccgacatctcccccgcctccttccaccgcctcgaccacctcgtcgagatcgacttccgctgcaactgcgtccccatccccctcggctccaagaacaacatgtgcatcaagcgcctccagatcaagccccgctccttctccggcctcacctacctcaagtccctctacctcgacggcaaccagctcctcgagatcccccagggcctccccccctccctccagctcctctccctcgaggccaacaacatcttctccatccgcaaggagaacctcaccgagctcgccaacatcgagatcctctacctcggccagaactgctactaccgcaacccctgctacgtctcctactccatcgagaaggacgccttcctcaacctcaccaagctcaaggtcctctccctcaaggacaacaacgtcaccgccgtccccaccgtcctcccctccaccctcaccgagctctacctctacaacaacatgatcgccaagatccaggaggacgacttcaacaacctcaaccagctccagatcctcgacctctccggcaactgcccccgctgctacaacgcccccttcccctgcgccccctgcaagaacaactcccccctccagatccccgtcaacgccttcgacgccctcaccgagctcaaggtcctccgcctccactccaactccctccagcacgtccccccccgctggttcaagaacatcaacaagctccaggagctcgacctctcccagaacttcctcgccaaggagatcggcgacgccaagttcctccacttcctcccctccctcatccagctcgacctctccttcaacttcgagctccaggtctaccgcgcctccatgaacctctcccaggccttctcctccctcaagtccctcaagatcctccgcatccgcggctacgtcttcaaggagctcaagtccttcaacctctcccccctccacaacctccagaacctcgaggtcctcgacctcggcaccaacttcatcaagatcgccaacctctccatgttcaagcagttcaagcgcctcaaggtcatcgacctctccgtcaacaagatctccccctccggcgactcctccgaggtcggcttctgctccaacgtccgcacctccgtcgagtcctacgagccccaggtcctcgagcagctccactacttccgctacgacaagtacgcccgctcctgccgcttcaagaacaaggaggcctccttcatgtccgtcaacgagtcctgctacaagtacggccagaccctcgacctctccaagaactccatcttcttcgtcaagtcctccgacttccagcacctctccttcctcaagtgcctcaacctctccggcaacctcatctcccagaccctcaacggctccgagttccagcccctcgccgagctccgctacctcgacttctccaacaaccgcctcgacctcctccactccaccgccttcgaggagctccacaagctcgaggtcctcgacatctcctccaactcccactacttccagtccgagggcatcacccacatgctcaacttcaccaagaacctcaaggtcctccagaagctcatgatgaacgacaacgacatctcctcctccacctcccgcaccatggagtccgagtccctccgcaccctcgagttccgcggcaaccacctcgacgtcctctggcgcgagggcgacaaccgctacctccagctcttcaagaacctcctcaagctcgaggagctcgacatctccaagaactccctctccttcctcccctccggcgtcttcgacggcatgccccccaacctcaagaacctctccctcgccaagaacggcctcaagtccttctcctggaagaagctccagtgcctcaagaacctcgagaccctcgacctctcccacaaccagctcaccaccgtccccgagcgcctctccaactgctcccgctccctcaagaacctcatcctcaagaacaaccagatccgctccctcaccaagtacttcctccaggacgccttccagctccgctacctcgacctctcctccaacaagatccagatgatccagaagacctccttccccgagaacgtcctcaacaacctcaagatgctcctcctccaccacaaccgcttcctctgcacctgcgacgccgtctggttcgtctggtgggtcaaccacaccgaggtcaccatcccctacctcgccaccgacgtcacctgcgtcggccccggcgcccacaagggccagtccgtcatctccctcgacctctacacctgcgagctcgacctcaccaacctcatcctcttctccctctccatctccgtctccctcttcctcatggtcatgatgaccgcctcccacctctacttctgggacgtctggtacatctaccacttctgcaaggccaagatcaagggctaccagcgcctcatctcccccgactgctgctacgacgccttcatcgtctacgacaccaaggaccccgccgtcaccgagtgggtcctcgccgagctcgtcgccaagctcgaggacccccgcgagaagcacttcaacctctgcctcgaggagcgcgactggctccccggccagcccgtcctcgagaacctctcccagtccatccagctctccaagaagaccgtcttcgtcatgaccgacaagtacgccaagaccgagaacttcaagatcgccttctacctctcccaccagcgcctcatggacgagaaggtcgacgtcatcatcctcatcttcctcgagaagcccttccagaagtccaagttcctccagctccgcaagcgcctctgcggctcctccgtcctcgagtggcccaccaacccccaggcccacccctacttctggcagtgcctcaagaacgccctcgccaccgacaaccacgtcgcctactcccaggtcttcaaggagaccgtctga

SEQ ID NO: 9771 - RNA, 3150 nt, synthetic construct
  misc_feature 1..3150: note = derived and/or modified sequence opt3 fromTLR7__Homo_sapiens__AAZ99025
  source 1..3150: mol_type = other RNA
atggtgttccccatgtggaccctgaagagactcatccttattctgtttaacataatcttgattagcaaattactgggcgccaggtggttccctaagacactaccatgcgacgtcactctcgatgttccgaaaaatcacgtgatcgtagactgtacggataagcatctgaccgagattcccgggggaatccctacaaacactaccaatcttacactgaccataaaccacatcccagacatttcccccgcttcttttcatcggttggatcacctcgtggaaatcgacttccgctgcaattgtgtccctattccactgggtagcaaaaacaatatgtgcatcaagcgactgcagataaagccccgtagttttagcggcctcacttacttaaaatccctgtatcttgatgggaaccaattgctggagattcctcagggactaccaccgtctctccagctgctttcgctggaagcaaataacatcttctcaattagaaaggagaatttgacagaactcgccaacatcgagatcctgtacttaggccagaattgttattacaggaacccctgctatgtgagctacagtattgagaaagacgcgtttctgaatctcaccaaacttaaagttctgtccttgaaggataacaacgtgacggctgtccctactgtgctaccatctaccctgacagaactctatctgtacaataacatgatagccaagatccaagaggacgatttcaataaccttaatcagctgcagattttggacctcagcggtaactgtccccggtgctacaatgcaccttttccatgtgccccctgcaaaaacaattccccgctgcagatccctgtaaacgctttcgatgcattaactgaactgaaggttctacgcctccattcaaatagtctgcaacacgtgcccccaagatggtttaaaaacataaataaacttcaggagttggacctgagccagaacttcctcgccaaagagattggggacgctaagtttctgcacttccttccttctctgatccagttggatctctccttcaattttgaactgcaagtctatagggcctcaatgaacttaagccaggcgttcagttctctgaaatccctaaagatcctccggattcgcggatacgtgtttaaggagctgaaatcattcaacctttcgcccttgcataatctgcagaacctcgaagtgctggacttaggcaccaattttatcaagattgcaaacctgtctatgttcaaacaatttaagcgacttaaagtcatagatttgtccgttaataagatctcaccaagtggcgacagctccgaggtggggttctgttctaacgtaagaacaagcgtggaatcatatgagccccaggtcctcgagcagctgcactactttaggtatgataagtacgcccggagttgccgtttcaaaaataaggaggcttcctttatgagcgtgaacgaatcttgctataaatacggacagaccctagacctgtcaaagaatagtattttctttgttaaaagctccgatttccaacatctctctttcctgaagtgtcttaacttgtcgggtaatctgatcagccagacgttaaacggctccgaatttcagcctctcgccgagctgcgctaccttgacttctcaaataacagactggatttgctccacagtactgcatttgaggaactgcacaagctagaggtgctggacatctctagcaattcccattatttccagtcagaagggattacacacatgctcaactttaccaaaaacctgaaggtccttcaaaaattgatgatgaatgataacgacataagttcttccactagcaggacaatggagagcgaatctctgcggaccttagagttccgaggaaatcatctcgacgtgctgtggcgcgaaggcgataacagataccttcagctgtttaagaatctactcaaactggaggagttggacatctccaagaactcactgagtttcttaccaagcggtgtatttgatgggatgccgcccaatctcaagaacctgtcgcttgctaaaaatggactgaagtccttctcttggaaaaagttgcagtgcctcaaaaacctggaaacgctagacctgagccacaatcagcttaccacagttcctgagaggctctcaaactgtagtcggtccctgaagaatttgattctgaaaaacaatcaaatccgctctttaactaagtattttctccaggatgccttccagctgagataccttgacctgagctccaacaagattcagatgatccaaaagacctcatttccagaaaacgtgttgaataacctcaagatgctgctactgcatcacaataggttcctttgcacatgtgatgcggtctggttcgtgtggtgggtcaaccacactgaggtgaccataccctatctcgccacagacgttacctgcgtgggccctggcgcacataaagggcagagcgtaatcagtctggatttgtacacttgtgagttagacctgacgaatctcattctgttttctctttccatcagcgtctcgctgttcttgatggtgatgatgacagcttcacacctatatttttgggatgtttggtacatttaccatttctgcaaggccaaaatcaagggatatcagcgtctgatatctccagactgttgctacgatgcttttattgtgtatgacaccaaggaccccgccgtcactgaatgggtgctcgcagagctggtagccaaacttgaagatccgcgggagaagcacttcaacttatgtctggaggaacgagactggctccctggtcaaccagtgttggagaatctgagtcagtccatccagctcagcaaaaagaccgtttttgtcatgacagataaatacgctaagaccgaaaacttcaagattgcgttttatctgtctcaccagagacttatggacgagaaagtggatgtgatcatactgatcttcttggaaaagccctttcaaaagagcaagttcctacagctgaggaaacgcctctgcggctcctcagtcttagagtggcctactaatccccaggcacatccatacttctggcagtgcctgaagaacgcccttgctacagacaatcacgttgcctatagtcaagtgtttaaggaaacggtgtga

SEQ ID NO: 9772 - RNA, 3150 nt, synthetic construct
  misc_feature 1..3150: note = derived and/or modified sequence opt4 fromTLR7__Homo_sapiens__AAZ99025
  source 1..3150: mol_type = other RNA
atggtgttccccatgtggaccctgaagagactgatcctgatcctgttcaacatcatcctgatcagcaagctgctgggcgccagatggttccccaagaccctgccctgcgacgtgaccctggacgtgcccaagaaccacgtgatcgtggactgcaccgacaagcacctgaccgagatccccggcggcatccccaccaacaccaccaacctgaccctgaccatcaaccacatccccgacatcagccccgccagcttccacagactggaccacctggtggagatcgacttcagatgcaactgcgtgcccatccccctgggcagcaagaacaacatgtgcatcaagagactgcagatcaagcccagaagcttcagcggcctgacctacctgaagagcctgtacctggacggcaaccagctgctggagatcccccagggcctgccccccagcctgcagctgctgagcctggaggccaacaacatcttcagcatcagaaaggagaacctgaccgagctggccaacatcgagatcctgtacctgggccagaactgctactacagaaacccctgctacgtgagctacagcatcgagaaggacgccttcctgaacctgaccaagctgaaggtgctgagcctgaaggacaacaacgtgaccgccgtgcccaccgtgctgcccagcaccctgaccgagctgtacctgtacaacaacatgatcgccaagatccaggaggacgacttcaacaacctgaaccagctgcagatcctggacctgagcggcaactgccccagatgctacaacgcccccttcccctgcgccccctgcaagaacaacagccccctgcagatccccgtgaacgccttcgacgccctgaccgagctgaaggtgctgagactgcacagcaacagcctgcagcacgtgccccccagatggttcaagaacatcaacaagctgcaggagctggacctgagccagaacttcctggccaaggagatcggcgacgccaagttcctgcacttcctgcccagcctgatccagctggacctgagcttcaacttcgagctgcaggtgtacagagccagcatgaacctgagccaggccttcagcagcctgaagagcctgaagatcctgagaatcagaggctacgtgttcaaggagctgaagagcttcaacctgagccccctgcacaacctgcagaacctggaggtgctggacctgggcaccaacttcatcaagatcgccaacctgagcatgttcaagcagttcaagagactgaaggtgatcgacctgagcgtgaacaagatcagccccagcggcgacagcagcgaggtgggcttctgcagcaacgtgagaaccagcgtggagagctacgagccccaggtgctggagcagctgcactacttcagatacgacaagtacgccagaagctgcagattcaagaacaaggaggccagcttcatgagcgtgaacgagagctgctacaagtacggccagaccctggacctgagcaagaacagcatcttcttcgtgaagagcagcgacttccagcacctgagcttcctgaagtgcctgaacctgagcggcaacctgatcagccagaccctgaacggcagcgagttccagcccctggccgagctgagatacctggacttcagcaacaacagactggacctgctgcacagcaccgccttcgaggagctgcacaagctggaggtgctggacatcagcagcaacagccactacttccagagcgagggcatcacccacatgctgaacttcaccaagaacctgaaggtgctgcagaagctgatgatgaacgacaacgacatcagcagcagcaccagcagaaccatggagagcgagagcctgagaaccctggagttcagaggcaaccacctggacgtgctgtggagagagggcgacaacagatacctgcagctgttcaagaacctgctgaagctggaggagctggacatcagcaagaacagcctgagcttcctgcccagcggcgtgttcgacggcatgccccccaacctgaagaacctgagcctggccaagaacggcctgaagagcttcagctggaagaagctgcagtgcctgaagaacctggagaccctggacctgagccacaaccagctgaccaccgtgcccgagagactgagcaactgcagcagaagcctgaagaacctgatcctgaagaacaaccagatcagaagcctgaccaagtacttcctgcaggacgccttccagctgagatacctggacctgagcagcaacaagatccagatgatccagaagaccagcttccccgagaacgtgctgaacaacctgaagatgctgctgctgcaccacaacagattcctgtgcacctgcgacgccgtgtggttcgtgtggtgggtgaaccacaccgaggtgaccatcccctacctggccaccgacgtgacctgcgtgggccccggcgcccacaagggccagagcgtgatcagcctggacctgtacacctgcgagctggacctgaccaacctgatcctgttcagcctgagcatcagcgtgagcctgttcctgatggtgatgatgaccgccagccacctgtacttctgggacgtgtggtacatctaccacttctgcaaggccaagatcaagggctaccagagactgatcagccccgactgctgctacgacgccttcatcgtgtacgacaccaaggaccccgccgtgaccgagtgggtgctggccgagctggtggccaagctggaggaccccagagagaagcacttcaacctgtgcctggaggagagagactggctgcccggccagcccgtgctggagaacctgagccagagcatccagctgagcaagaagaccgtgttcgtgatgaccgacaagtacgccaagaccgagaacttcaagatcgccttctacctgagccaccagagactgatggacgagaaggtggacgtgatcatcctgatcttcctggagaagcccttccagaagagcaagttcctgcagctgagaaagagactgtgcggcagcagcgtgctggagtggcccaccaacccccaggcccacccctacttctggcagtgcctgaagaacgccctggccaccgacaaccacgtggcctacagccaggtgttcaaggagaccgtgtga

SEQ ID NO: 9773 - RNA, 3150 nt, synthetic construct
  misc_feature 1..3150: note = derived and/or modified sequence opt5 fromTLR7__Homo_sapiens__AAZ99025
  source 1..3150: mol_type = other RNA
atggtgttccccatgtggaccctgaagagactcatcctgattctttttaacatcattctgatcagcaaactcctgggcgcccggtggttccctaagacacttccgtgcgacgtcacgctggatgttcccaaaaatcacgtgattgtggactgtaccgataagcatctcacagagatccctgggggaatccccaccaacacaaccaatctgacactgaccattaaccacatccctgacatttcccccgcttcttttcatcgcctcgatcacctggtcgaaatcgacttcagatgcaattgtgtgcctattccgcttggcagcaaaaacaatatgtgcatcaagcggctgcagattaagccccgctccttttctgggctcacgtacctgaaaagcctttatctggatggaaaccaactcctggagatccctcagggcctgcccccttccctccagctgctttctctggaagccaataacatcttcagcattagaaaggagaatctcaccgaactggcgaacatcgagattctttacctggggcagaattgttattaccggaacccctgctatgtttcctacagcatcgagaaagacgcttttctcaatctgacaaagctgaaagtgctctctctgaaggataacaacgtcaccgccgtgccgacagttcttccttccaccctgacggaactctatctgtacaataacatgattgccaagatccaagaggacgatttcaataaccttaatcagctgcagatcctcgacctgagcggaaactgtccccgctgctacaatgctccttttccctgtgccccctgcaaaaacaattctcctctgcagattccggtgaacgctttcgatgccctcacagaactgaaggtccttagactgcattccaatagcctccaacacgtgccccctcggtggtttaaaaacatcaataagctgcaggagctggacctttctcagaacttcctcgcgaaagagattggcgacgccaagtttctgcacttcctgccctccctcatccagctggatcttagcttcaattttgaactgcaagtgtatcgcgcttccatgaacctctctcaggccttcagctccctgaaaagcctgaagattcttagaatccggggctacgtctttaaggagctcaaatctttcaacctgtcccctctgcataatctccagaacctggaagttcttgacctggggaccaattttatcaagattgctaacctcagcatgttcaaacaatttaagcgcctgaaagtgatcgatctgtctgtgaataagattagcccctccggagactctagcgaggtcggcttctgttccaacgtgagaacaagcgttgaatcttatgagcctcaggtgcttgagcagctccactactttcggtatgataagtacgcccgctcctgcagattcaaaaataaggaagcgagctttatgtctgtcaacgagtcctgctataaatacgggcagaccctggacctgagcaaaaattccatcttctttgtgaaatctagcgatttccaacatctctccttcctgaagtgtcttaacctgtctggaaatctcattagccagaccctgaacggctccgaatttcagccgctggccgagcttcggtacctcgacttcagcaataacagactggatctgctccactctacagcttttgaagaactgcacaaacttgaggttctggacatctccagcaattctcattatttccagtccgaagggattacgcacatgctcaactttaccaagaacctgaaggtgctgcaaaaacttatgatgaatgataacgacatcagctctagcacatcccgcaccatggagagcgaatctctgcggacactcgagttcagaggaaatcatctggacgtcctctggcgcgaaggcgataaccggtacctgcagctttttaagaatctgctcaaactggaggagctggacatctccaagaacagcctttccttcctgccctctggcgtgtttgatgggatgcctcccaatctcaagaacctgagcctcgccaaaaatggactgaagtccttctcttggaaaaagctgcagtgccttaaaaacctcgaaaccctggacctgagccacaatcagcttacgacagtccctgagagactgtccaactgttctcgcagcctcaagaatctgattctcaaaaacaatcaaatccggtccctgaccaagtattttcttcaggatgctttccagctgagatacctggacctcagctctaacaagattcagatgatccaaaagacctcctttcccgaaaacgtgctgaataaccttaagatgctgctcctgcatcacaatcgcttcctctgcacatgtgatgccgtttggttcgtgtggtgggtcaaccacaccgaggtgacaattccgtatctggccacggacgttacctgcgtgggccctggggctcataaaggacagagcgtcatctctcttgatctgtacacatgtgagctggacctcaccaatctgatcctgttttcccttagcatttctgtgtccctcttcctgatggtgatgatgacagcgagccacctctatttttgggatgtttggtacatctaccatttctgcaaggccaaaattaagggctatcagcggctgatctcccccgactgttgctacgatgcttttattgtctatgacaccaaggaccccgccgtgacggaatgggtgcttgccgagctggtcgctaaactggaagatcctagagagaagcacttcaacctctgtctggaggagcgcgactggcttccggggcaacccgtgctggagaatctcagccagtctatccagctgagcaaaaagaccgtttttgtgatgacagataaatacgccaagaccgaaaacttcaagatcgcgttttatctctcccaccagcggctgatggacgagaaagtcgatgtgattatccttattttcctggaaaagccttttcaaaaatctaagttcctgcagctcagaaaacggctgtgcggaagctccgttcttgagtggcccacaaatcctcaggctcatccctacttctggcagtgcctgaagaacgccctcgccaccgacaatcacgtggcttattctcaagtctttaaggaaacggtgtga

SEQ ID NO: 9774 - protein, 1049 aa, synthetic construct; identical to SEQ ID NO: 9760
  REGION 1..1049: note = TLR7__Homo_sapiens__Q9NYK1

SEQ ID NO: 9775 - RNA, 3150 nt, synthetic construct
  misc_feature 1..3150: note = TLR7__Homo_sapiens__AAF60188
  source 1..3150: mol_type = other RNA
atggtgtttccaatgtggacactgaagagacaaattcttatcctttttaacataatcctaatttccaaactccttggggctagatggtttcctaaaactctgccctgtgatgtcactctggatgttccaaagaaccatgtgatcgtggactgcacagacaagcatttgacagaaattcctggaggtattcccacgaacaccacgaacctcaccctcaccattaaccacataccagacatctccccagcgtcctttcacagactggaccatctggtagagatcgatttcagatgcaactgtgtacctattccactggggtcaaaaaacaacatgtgcatcaagaggctgcagattaaacccagaagctttagtggactcacttatttaaaatccctttacctggatggaaaccagctactagagataccgcagggcctcccgcctagcttacagcttctcagccttgaggccaacaacatcttttccatcagaaaagagaatctaacagaactggccaacatagaaatactctacctgggccaaaactgttattatcgaaatccttgttatgtttcatattcaatagagaaagatgccttcctaaacttgacaaagttaaaagtgctctccctgaaagataacaatgtcacagccgtccctactgttttgccatctactttaacagaactatatctctacaacaacatgattgcaaaaatccaagaagatgattttaataacctcaaccaattacaaattcttgacctaagtggaaattgccctcgttgttataatgccccatttccttgtgcgccgtgtaaaaataattctcccctacagatccctgtaaatgcttttgatgcgctgacagaattaaaagttttacgtctacacagtaactctcttcagcatgtgcccccaagatggtttaagaacatcaacaaactccaggaactggatctgtcccaaaacttcttggccaaagaaattggggatgctaaatttctgcattttctccccagcctcatccaattggatctgtctttcaattttgaacttcaggtctatcgtgcatctatgaatctatcacaagcattttcttcactgaaaagcctgaaaattctgcggatcagaggatatgtctttaaagagttgaaaagctttaacctctcgccattacataatcttcaaaatcttgaagttcttgatcttggcactaactttataaaaattgctaacctcagcatgtttaaacaatttaaaagactgaaagtcatagatctttcagtgaataaaatatcaccttcaggagattcaagtgaagttggcttctgctcaaatgccagaacttctgtagaaagttatgaaccccaggtcctggaacaattacattatttcagatatgataagtatgcaaggagttgcagattcaaaaacaaagaggcttctttcatgtctgttaatgaaagctgctacaagtatgggcagaccttggatctaagtaaaaatagtatattttttgtcaagtcctctgattttcagcatctttctttcctcaaatgcctgaatctgtcaggaaatctcattagccaaactcttaatggcagtgaattccaacctttagcagagctgagatatttggacttctccaacaaccggcttgatttactccattcaacagcatttgaagagcttcacaaactggaagttctggatataagcagtaatagccattattttcaatcagaaggaattactcatatgctaaactttaccaagaacctaaaggttctgcagaaactgatgatgaacgacaatgacatctcttcctccaccagcaggaccatggagagtgagtctcttagaactctggaattcagaggaaatcacttagatgttttatggagagaaggtgataacagatacttacaattattcaagaatctgctaaaattagaggaattagacatctctaaaaattccctaagtttcttgccttctggagtttttgatggtatgcctccaaatctaaagaatctctctttggccaaaaatgggctcaaatctttcagttggaagaaactccagtgtctaaagaacctggaaactttggacctcagccacaaccaactgaccactgtccctgagagattatccaactgttccagaagcctcaagaatctgattcttaagaataatcaaatcaggagtctgacgaagtattttctacaagatgccttccagttgcgatatctggatctcagctcaaataaaatccagatgatccaaaagaccagcttcccagaaaatgtcctcaacaatctgaagatgttgcttttgcatcataatcggtttctgtgcacctgtgatgctgtgtggtttgtctggtgggttaaccatacggaggtgactattccttacctggccacagatgtgacttgtgtggggccaggagcacacaagggccaaagtgtgatctccctggatctgtacacctgtgagttagatctgactaacctgattctgttctcactttccatatctgtatctctctttctcatggtgatgatgacagcaagtcacctctatttctgggatgtgtggtatatttaccatttctgtaaggccaagataaaggggtatcagcgtctaatatcaccagactgttgctatgatgcttttattgtgtatgacactaaagacccagctgtgaccgagtgggttttggctgagctggtggccaaactggaagacccaagagagaaacattttaatttatgtctcgaggaaagggactggttaccagggcagccagttctggaaaacctttcccagagcatacagcttagcaaaaagacagtgtttgtgatgacagacaagtatgcaaagactgaaaattttaagatagcattttacttgtcccatcagaggctcatggatgaaaaagttgatgtgattatcttgatatttcttgagaagccctttcagaagtccaagttcctccagctccggaaaaggctctgtgggagttctgtccttgagtggccaacaaacccgcaagctcacccatacttctggcagtgtctaaagaacgccctggccacagacaatcatgtggcctatagtcaggtgttcaaggaaacggtctag

SEQ ID NO: 9776 - RNA, 3150 nt, synthetic construct; identical to SEQ ID NO: 9762
  misc_feature 1..3150: note = derived and/or modified sequence opt1 fromTLR7__Homo_sapiens__AAF60188
  source 1..3150: mol_type = other RNA

SEQ ID NO: 9777 - RNA, 3150 nt, synthetic construct; identical to SEQ ID NO: 9763
  misc_feature 1..3150: note = derived and/or modified sequence opt2 fromTLR7__Homo_sapiens__AAF60188
  source 1..3150: mol_type = other RNA

SEQ ID NO: 9778 - RNA, 3150 nt, synthetic construct; identical to SEQ ID NO: 9764
  misc_feature 1..3150: note = derived and/or modified sequence opt3 fromTLR7__Homo_sapiens__AAF60188
  source 1..3150: mol_type = other RNA

SEQ ID NO: 9779 - RNA, 3150 nt, synthetic construct; identical to SEQ ID NO: 9765
  misc_feature 1..3150: note = derived and/or modified sequence opt4 fromTLR7__Homo_sapiens__AAF60188
  source 1..3150: mol_type = other RNA

SEQ ID NO: 9780 - RNA, 3150 nt, synthetic construct; identical to SEQ ID NO: 9766
  misc_feature 1..3150: note = derived and/or modified sequence opt5 fromTLR7__Homo_sapiens__AAF60188
  source 1..3150: mol_type = other RNA

SEQ ID NO: 9781 - protein, 1041 aa, synthetic construct [sequence omitted]

SEQ ID NO: 9782 - RNA, 3126 nt, synthetic construct
  misc_feature 1..3126: note = TLR8__Homo_sapiens__AAI01076
  source 1..3126: mol_type = other RNA
atggaaaacatgttccttcagtcgtcaatgctgacctgcattttcctgctaatatctggttcctgtgagttatgcgccgaagaaaatttttctagaagctatccttgtgatgagaaaaagcaaaatgactcagttattgcagagtgcagcaatcgtcgactacaggaagttccccaaacggtgggcaaatatgtgacagaactagacctgtctgataatttcatcacacacataacgaatgaatcatttcaagggctgcaaaatctcactaaaataaatctaaaccacaaccccaatgtacagcaccagaacggaaatcccggtatacaatcaaatggcttgaatatcacagacggggcattcctcaacctaaaaaacctaagggagttactgcttgaagacaaccagttaccccaaataccctctggtttgccagagtctttgacagaacttagtctaattcaaaacaatatatacaacataactaaagagggcatttcaagacttataaacttgaaaaatctctatttggcctggaactgctattttaacaaagtttgcgagaaaactaacatagaagatggagtatttgaaacgctgacaaatttggagttgctatcactatctttcaattctctttcacacgtgccacccaaactgccaagctccctacgcaaactttttctgagcaacacccagatcaaatacattagtgaagaagatttcaagggattgataaatttaacattactagatttaagcgggaactgtccgaggtgcttcaatgccccatttccatgcgtgccttgtgatggtggtgcttcaattaatatagatcgttttgcttttcaaaacttgacccaacttcgatacctaaacctctctagcacttccctcaggaagattaatgctgcctggtttaaaaatatgcctcatctgaaggtgctggatcttgaattcaactatttagtgggagaaatagcctctggggcatttttaacgatgctgccccgcttagaaatacttgacttgtcttttaactatataaaggggagttatccacagcatattaatatttccagaaacttctctaaacttttgtctctacgggcattgcatttaagaggttatgtgttccaggaactcagagaagatgatttccagcccctgatgcagcttccaaacttatcgactatcaacttgggtattaattttattaagcaaatcgatttcaaacttttccaaaatttctccaatctggaaattatttacttgtcagaaaacagaatatcaccgttggtaaaagatacccggcagagttatgcaaatagttcctcttttcaacgtcatatccggaaacgacgctcaacagattttgagtttgacccacattcgaacttttatcatttcacccgtcctttaataaagccacaatgtgctgcttatggaaaagccttagatttaagcctcaacagtattttcttcattgggccaaaccaatttgaaaatcttcctgacattgcctgtttaaatctgtctgcaaatagcaatgctcaagtgttaagtggaactgaattttcagccattcctcatgtcaaatatttggatttgacaaacaatagactagactttgataatgctagtgctcttactgaattgtccgacttggaagttctagatctcagctataattcacactatttcagaatagcaggcgtaacacatcatctagaatttattcaaaatttcacaaatctaaaagttttaaacttgagccacaacaacatttatactttaacagataagtataacctggaaagcaagtccctggtagaattagttttcagtggcaatcgccttgacattttgtggaatgatgatgacaacaggtatatctccattttcaaaggtctcaagaatctgacacgtctggatttatcccttaataggctgaagcacatcccaaatgaagcattccttaatttgccagcgagtctcactgaactacatataaatgataatatgttaaagttttttaactggacattactccagcagtttcctcgtctcgagttgcttgacttacgtggaaacaaactactctttttaactgatagcctatctgactttacatcttcccttcggacactgctgctgagtcataacaggatttcccacctaccctctggctttctttctgaagtcagtagtctgaagcacctcgatttaagttccaatctgctaaaaacaatcaacaaatccgcacttgaaactaagaccaccaccaaattatctatgttggaactacacggaaacccctttgaatgcacctgtgacattggagatttccgaagatggatggatgaacatctgaatgtcaaaattcccagactggtagatgtcatttgtgccagtcctggggatcaaagagggaagagtattgtgagtctggagctaacaacttgtgtttcagatgtcactgcagtgatattatttttcttcacgttctttatcaccaccatggttatgttggctgccctggctcaccatttgttttactgggatgtttggtttatatataatgtgtgtttagctaaggtaaaaggctacaggtctctttccacatcccaaactttctatgatgcttacgtttcttatgacaccaaagatgcctctgttactgactgggtgataaatgagctgcgctaccaccttgaagagagccgagacaaaaacgttctcctttgtctagaggagagggattgggacccgggattggccatcatcgacaacctcatgcagagcatcaaccaaagcaagaaaacagtatttgttttaaccaaaaaatatgcaaaaagctggaactttaaaacagctttttacttggctttgcagaggctaatggatgagaacatggatgtgattatatttatcctgctggagccagtgttacagcattctcagtatttgaggctacggcagcggatctgtaagagctccatcctccagtggcctgacaacccgaaggcagaaggcttgttttggcaaactctgagaaatgtggtcttgactgaaaatgattcacggtataacaatatgtatgtcgattccattaagcaatactaa

SEQ ID NO: 9783 - RNA, 3126 nt, synthetic construct
  misc_feature 1..3126: note = derived and/or modified sequence opt1 fromTLR8__Homo_sapiens__AAI01076
  source 1..3126: mol_type = other RNA
atggagaacatgttcctgcagagctccatgctgacctgcatcttcctgctgatcagcggctcctgcgagctctgcgccgaggagaacttcagccgctcctacccctgcgacgagaagaagcagaacgacagcgtgatcgccgagtgctccaaccggcgcctgcaggaggtcccgcagaccgtggggaagtacgtgacggagctggacctcagcgacaacttcatcacccacatcaccaacgagtccttccagggcctgcagaacctgaccaagatcaacctcaaccacaaccccaacgtccagcaccagaacgggaaccccggcatccagagcaacgggctgaacatcacggacggcgcgttcctgaacctcaagaacctgcgggagctgctcctggaggacaaccagctgccccagatcccgtccggcctccccgagagcctgaccgagctgtccctcatccagaacaacatctacaacatcaccaaggaggggatcagccgcctgatcaacctgaagaacctctacctggcctggaactgctacttcaacaaggtgtgcgagaagaccaacatcgaggacggcgtgttcgagacgctgaccaacctcgagctgctgtccctcagcttcaactccctgagccacgtcccgcccaagctgccctccagcctccggaagctgttcctgagcaacacccagatcaagtacatctccgaggaggacttcaaggggctcatcaacctgaccctgctcgacctgagcggcaactgcccccgctgcttcaacgcccccttcccctgcgtgccgtgcgacgggggcgcctccatcaacatcgaccggttcgccttccagaacctgacgcagctccgctacctgaacctgagctccaccagcctccggaagatcaacgcggcctggttcaagaacatgccccacctgaaggtgctggacctcgagttcaactacctggtcggcgagatcgcctccggggccttcctgaccatgctgccccgcctcgagatcctggacctgagcttcaactacatcaagggctcctacccccagcacatcaacatcagccggaacttctccaagctcctgagcctgcgcgcgctccacctccgggggtacgtgttccaggagctgcgcgaggacgacttccagccgctcatgcagctgcccaacctgtccaccatcaacctcggcatcaacttcatcaagcagatcgacttcaagctgttccagaacttcagcaacctggagatcatctacctctccgagaaccggatcagccccctggtgaaggacacgcgccagtcctacgccaacagctccagcttccagcggcacatccgcaagcggcgcagcaccgacttcgagttcgacccccactccaacttctaccacttcacccggccgctgatcaagccccagtgcgccgcctacggcaaggccctcgacctgagcctgaactccatcttcttcatcgggcccaaccagttcgagaacctccccgacatcgcgtgcctgaacctgagcgccaactccaacgcccaggtcctcagcggcaccgagttctccgccatcccgcacgtgaagtacctggacctgacgaacaaccgcctcgacttcgacaacgccagcgcgctgaccgagctgtccgacctcgaggtgctggacctgagctacaactcccactacttccgcatcgccggggtcacccaccacctcgagttcatccagaacttcaccaacctgaaggtgctgaacctcagccacaacaacatctacacgctgaccgacaagtacaacctggagtccaagagcctcgtggagctggtcttctccggcaaccggctggacatcctctggaacgacgacgacaaccgctacatcagcatcttcaaggggctgaagaacctgacccggctcgacctgtccctgaaccgcctcaagcacatccccaacgaggccttcctgaacctgcccgccagcctcaccgagctgcacatcaacgacaacatgctgaagttcttcaactggacgctcctgcagcagttcccccggctggagctcctggacctgcgcggcaacaagctcctgttcctgaccgacagcctctccgacttcaccagctccctgcggaccctgctcctgagccacaaccgcatctcccacctcccgagcggcttcctgtccgaggtgagctccctgaagcacctggacctcagctccaacctgctgaagacgatcaacaagagcgccctcgagaccaagaccaccacgaagctgtccatgctggagctccacgggaaccccttcgagtgcacgtgcgacatcggcgacttccggcgctggatggacgagcacctgaacgtgaagatcccccggctggtcgacgtgatctgcgcgagcccgggggaccagcgcggcaagtccatcgtgagcctcgagctgacgacctgcgtctccgacgtgaccgccgtcatcctgttcttcttcaccttcttcatcaccaccatggtgatgctcgccgccctggcccaccacctgttctactgggacgtgtggttcatctacaacgtctgcctcgcgaaggtgaaggggtaccggagcctgtccaccagccagaccttctacgacgcctacgtgagctacgacaccaaggacgcctccgtcaccgactgggtgatcaacgagctgcgctaccacctcgaggagagccgggacaagaacgtgctgctgtgcctcgaggagcgcgactgggaccccggcctggccatcatcgacaacctgatgcagtccatcaaccagagcaagaagaccgtcttcgtgctgacgaagaagtacgcgaagtcctggaacttcaagaccgccttctacctcgccctgcagcggctgatggacgagaacatggacgtgatcatcttcatcctcctggagcccgtcctgcagcacagccagtacctccgcctgcggcagcgcatctgcaagtccagcatcctgcagtggcccgacaacccgaaggccgagggcctcttctggcagaccctgcgcaacgtggtgctgaccgagaacgactcccggtacaacaacatgtacgtcgacagcatcaagcagtactga

SEQ ID NO: 9784 - RNA, 3126 nt, synthetic construct
  misc_feature 1..3126: note = derived and/or modified sequence opt2 fromTLR8__Homo_sapiens__AAI01076
  source 1..3126: mol_type = other RNA
atggagaacatgttcctccagtcctccatgctcacctgcatcttcctcctcatctccggctcctgcgagctctgcgccgaggagaacttctcccgctcctacccctgcgacgagaagaagcagaacgactccgtcatcgccgagtgctccaaccgccgcctccaggaggtcccccagaccgtcggcaagtacgtcaccgagctcgacctctccgacaacttcatcacccacatcaccaacgagtccttccagggcctccagaacctcaccaagatcaacctcaaccacaaccccaacgtccagcaccagaacggcaaccccggcatccagtccaacggcctcaacatcaccgacggcgccttcctcaacctcaagaacctccgcgagctcctcctcgaggacaaccagctcccccagatcccctccggcctccccgagtccctcaccgagctctccctcatccagaacaacatctacaacatcaccaaggagggcatctcccgcctcatcaacctcaagaacctctacctcgcctggaactgctacttcaacaaggtctgcgagaagaccaacatcgaggacggcgtcttcgagaccctcaccaacctcgagctcctctccctctccttcaactccctctcccacgtcccccccaagctcccctcctccctccgcaagctcttcctctccaacacccagatcaagtacatctccgaggaggacttcaagggcctcatcaacctcaccctcctcgacctctccggcaactgcccccgctgcttcaacgcccccttcccctgcgtcccctgcgacggcggcgcctccatcaacatcgaccgcttcgccttccagaacctcacccagctccgctacctcaacctctcctccacctccctccgcaagatcaacgccgcctggttcaagaacatgccccacctcaaggtcctcgacctcgagttcaactacctcgtcggcgagatcgcctccggcgccttcctcaccatgctcccccgcctcgagatcctcgacctctccttcaactacatcaagggctcctacccccagcacatcaacatctcccgcaacttctccaagctcctctccctccgcgccctccacctccgcggctacgtcttccaggagctccgcgaggacgacttccagcccctcatgcagctccccaacctctccaccatcaacctcggcatcaacttcatcaagcagatcgacttcaagctcttccagaacttctccaacctcgagatcatctacctctccgagaaccgcatctcccccctcgtcaaggacacccgccagtcctacgccaactcctcctccttccagcgccacatccgcaagcgccgctccaccgacttcgagttcgacccccactccaacttctaccacttcacccgccccctcatcaagccccagtgcgccgcctacggcaaggccctcgacctctccctcaactccatcttcttcatcggccccaaccagttcgagaacctccccgacatcgcctgcctcaacctctccgccaactccaacgcccaggtcctctccggcaccgagttctccgccatcccccacgtcaagtacctcgacctcaccaacaaccgcctcgacttcgacaacgcctccgccctcaccgagctctccgacctcgaggtcctcgacctctcctacaactcccactacttccgcatcgccggcgtcacccaccacctcgagttcatccagaacttcaccaacctcaaggtcctcaacctctcccacaacaacatctacaccctcaccgacaagtacaacctcgagtccaagtccctcgtcgagctcgtcttctccggcaaccgcctcgacatcctctggaacgacgacgacaaccgctacatctccatcttcaagggcctcaagaacctcacccgcctcgacctctccctcaaccgcctcaagcacatccccaacgaggccttcctcaacctccccgcctccctcaccgagctccacatcaacgacaacatgctcaagttcttcaactggaccctcctccagcagttcccccgcctcgagctcctcgacctccgcggcaacaagctcctcttcctcaccgactccctctccgacttcacctcctccctccgcaccctcctcctctcccacaaccgcatctcccacctcccctccggcttcctctccgaggtctcctccctcaagcacctcgacctctcctccaacctcctcaagaccatcaacaagtccgccctcgagaccaagaccaccaccaagctctccatgctcgagctccacggcaaccccttcgagtgcacctgcgacatcggcgacttccgccgctggatggacgagcacctcaacgtcaagatcccccgcctcgtcgacgtcatctgcgcctcccccggcgaccagcgcggcaagtccatcgtctccctcgagctcaccacctgcgtctccgacgtcaccgccgtcatcctcttcttcttcaccttcttcatcaccaccatggtcatgctcgccgccctcgcccaccacctcttctactgggacgtctggttcatctacaacgtctgcctcgccaaggtcaagggctaccgctccctctccacctcccagaccttctacgacgcctacgtctcctacgacaccaaggacgcctccgtcaccgactgggtcatcaacgagctccgctaccacctcgaggagtcccgcgacaagaacgtcctcctctgcctcgaggagcgcgactgggaccccggcctcgccatcatcgacaacctcatgcagtccatcaaccagtccaagaagaccgtcttcgtcctcaccaagaagtacgccaagtcctggaacttcaagaccgccttctacctcgccctccagcgcctcatggacgagaacatggacgtcatcatcttcatcctcctcgagcccgtcctccagcactcccagtacctccgcctccgccagcgcatctgcaagtcctccatcctccagtggcccgacaaccccaaggccgagggcctcttctggcagaccctccgcaacgtcgtcctcaccgagaacgactcccgctacaacaacatgtacgtcgactccatcaagcagtactga

SEQ ID NO: 9785 - RNA, 3126 nt, synthetic construct
  misc_feature 1..3126: note = derived and/or modified sequence opt3 fromTLR8__Homo_sapiens__AAI01076
  source 1..3126: mol_type = other RNA
atggagaacatgttcctgcagagctccatgttgacctgcatctttcttctgatttctggctcatgtgaattgtgcgccgaggaaaatttcagtagaagctacccctgtgacgagaagaaacaaaacgattccgtgatagctgaatgctctaataggcggttacaggaggtccctcagacagttgggaagtatgtgactgagctggacctatcggataactttatcacgcacattaccaatgaatcattccagggactccaaaacctgacaaaaatcaatcttaaccataatccaaacgtacagcaccagaatggtaacccgggcattcagagcaatgggctgaacatcactgacggagcatttttgaatctcaagaacctgcgcgagctgctcttagaagataaccaactgccccagatacctagtggccttccagagtccttgaccgagctgtctctaatccagaataacatttacaatatcacaaaagaaggtattagccgactcatcaacctgaagaatctttatctggcctggaactgttacttcaataaggtgtgcgagaaaaccaacatagaagacggggtctttgagactttgacaaatctcgaactgttatccctgtcattcaacagtctcagccatgtgccccctaaacttccatcttccctgcgtaagttgtttctatcaaatacccagattaagtatatcagcgaggaggatttcaaaggactgattaacctcacgctgcttgacctgagtggcaattgtcccagatgctttaacgcgcctttcccatgtgttccgtgcgatggcggggcttctatcaatatcgacaggtttgccttccaaaacttgactcagctccggtacctgaacttatccagcacctcgctgcgcaagattaatgcagcctggttcaagaacatgccccacctaaaagtgctcgatctggaatttaattatcttgtcggagagatagcttctggtgcattcttgacaatgctgcctagactcgaaatcctggacctttcctttaactacattaagggctcatacccacagcatatcaatataagtaggaacttcagcaaactgttgtccctccgggccctgcacttacgcgggtatgtgtttcaagagctgcgagaagatgacttccagcccctaatgcagctccctaatctgtctactattaaccttggaatcaattttatcaagcagattgacttcaaattgtttcaaaacttcagcaatctggagatcatttacctctcagagaacagaataagtccactggtaaaggataccaggcagtcctatgctaattcttcttcatttcagcggcacatccgtaaacgcagaagtacagacttcgaatttgatccccatagcaacttctaccacttcaccaggccgttaattaagcctcagtgtgccgcgtatggcaaggcactggacctttccttgaatagcatctttttcatcggtcccaaccaatttgagaacctcccagatattgcctgcctgaatctatcggctaacagcaatgcccaggttctgtccgggacggaattttcagcaatacctcatgtgaaatacctcgacctgactaacaatcggcttgattttgacaacgctagtgccttgacagagctgtctgatttagaagtcctcgacctgagctataattcccactacttccgaatcgcgggagtgacccaccatcttgagtttattcagaacttcactaatctgaaggtgttgaacctctcacacaataacatctacacactgaccgataaatataatctagagagcaagtctctggtcgaactcgttttctccggcaaccgcctggacattctttggaatgacgatgacaacagatacatcagtatattcaaaggcttgaagaacctgacgaggttagatctcagcctgaatcggcttaagcatatccccaacgaggcctttctgaatctaccagcatctctcaccgaactgcacattaacgacaatatgttgaaattctttaactggacactgttacagcaattcccccgcctcgagctgcttgatctgagagggaataagctcctcttcctgactgactccctatcagattttaccagtagcctgaggacacttctcctgtcgcataaccgtatctcccacttgccttctggattcctgagcgaggtgtcaagtttaaaacacctcgacctgtcctctaatcttctgaagactattaacaaaagcgctttggaaaccaagacaaccactaagctctccatgctggagctacatggtaatccatttgaatgcacgtgtgatatcggcgacttccggcgatggatggatgagcacctgaacgtaaaaataccgagacttgtggacgtcatttgcgcctcacccggggatcagaggggaaagagcatcgtgagtctcgaactgacaacctgtgtttctgacgtgactgctgtcattttgtttttctttaccttctttatcacaaccatggtgatgttagccgcactggcccatcacctcttctattgggacgtatggtttatatacaatgtttgcctggctaaagtgaagggctatcgctcccttagcacttcgcagacattctacgatgcgtatgtctcatacgacacgaaagatgcatctgtgaccgactgggtcatcaacgagctgcggtaccacttggaggaaagtagagataagaatgtgctactgtgtctcgaggaaagggactgggatcctggtctggccattatcgacaaccttatgcagtccattaatcaaagcaagaaaactgttttcgtgttaacaaagaaatatgctaagtcttggaactttaaaaccgccttctacctggcactccagcgcttgatggatgagaacatggacgtaatcatatttattctgctcgaaccagtcctgcagcatagccaatatcttcgactgcggcagcgtatctgcaagtcctcaatcttgcagtggcccgataatcctaaagccgaggggctattctggcagacactgagaaacgtggttctcactgagaatgacagtaggtacaacaatatgtatgtggatagcattaagcaatactga

SEQ ID NO: 9786 - RNA, 3126 nt, synthetic construct
  misc_feature 1..3126: note = derived and/or modified sequence opt4 fromTLR8__Homo_sapiens__AAI01076
  source 1..3126: mol_type = other RNA
atggagaacatgttcctgcagagcagcatgctgacctgcatcttcctgctgatcagcggcagctgcgagctgtgcgccgaggagaacttcagcagaagctacccctgcgacgagaagaagcagaacgacagcgtgatcgccgagtgcagcaacagaagactgcaggaggtgccccagaccgtgggcaagtacgtgaccgagctggacctgagcgacaacttcatcacccacatcaccaacgagagcttccagggcctgcagaacctgaccaagatcaacctgaaccacaaccccaacgtgcagcaccagaacggcaaccccggcatccagagcaacggcctgaacatcaccgacggcgccttcctgaacctgaagaacctgagagagctgctgctggaggacaaccagctgccccagatccccagcggcctgcccgagagcctgaccgagctgagcctgatccagaacaacatctacaacatcaccaaggagggcatcagcagactgatcaacctgaagaacctgtacctggcctggaactgctacttcaacaaggtgtgcgagaagaccaacatcgaggacggcgtgttcgagaccctgaccaacctggagctgctgagcctgagcttcaacagcctgagccacgtgccccccaagctgcccagcagcctgagaaagctgttcctgagcaacacccagatcaagtacatcagcgaggaggacttcaagggcctgatcaacctgaccctgctggacctgagcggcaactgccccagatgcttcaacgcccccttcccctgcgtgccctgcgacggcggcgccagcatcaacatcgacagattcgccttccagaacctgacccagctgagatacctgaacctgagcagcaccagcctgagaaagatcaacgccgcctggttcaagaacatgccccacctgaaggtgctggacctggagttcaactacctggtgggcgagatcgccagcggcgccttcctgaccatgctgcccagactggagatcctggacctgagcttcaactacatcaagggcagctacccccagcacatcaacatcagcagaaacttcagcaagctgctgagcctgagagccctgcacctgagaggctacgtgttccaggagctgagagaggacgacttccagcccctgatgcagctgcccaacctgagcaccatcaacctgggcatcaacttcatcaagcagatcgacttcaagctgttccagaacttcagcaacctggagatcatctacctgagcgagaacagaatcagccccctggtgaaggacaccagacagagctacgccaacagcagcagcttccagagacacatcagaaagagaagaagcaccgacttcgagttcgacccccacagcaacttctaccacttcaccagacccctgatcaagccccagtgcgccgcctacggcaaggccctggacctgagcctgaacagcatcttcttcatcggccccaaccagttcgagaacctgcccgacatcgcctgcctgaacctgagcgccaacagcaacgcccaggtgctgagcggcaccgagttcagcgccatcccccacgtgaagtacctggacctgaccaacaacagactggacttcgacaacgccagcgccctgaccgagctgagcgacctggaggtgctggacctgagctacaacagccactacttcagaatcgccggcgtgacccaccacctggagttcatccagaacttcaccaacctgaaggtgctgaacctgagccacaacaacatctacaccctgaccgacaagtacaacctggagagcaagagcctggtggagctggtgttcagcggcaacagactggacatcctgtggaacgacgacgacaacagatacatcagcatcttcaagggcctgaagaacctgaccagactggacctgagcctgaacagactgaagcacatccccaacgaggccttcctgaacctgcccgccagcctgaccgagctgcacatcaacgacaacatgctgaagttcttcaactggaccctgctgcagcagttccccagactggagctgctggacctgagaggcaacaagctgctgttcctgaccgacagcctgagcgacttcaccagcagcctgagaaccctgctgctgagccacaacagaatcagccacctgcccagcggcttcctgagcgaggtgagcagcctgaagcacctggacctgagcagcaacctgctgaagaccatcaacaagagcgccctggagaccaagaccaccaccaagctgagcatgctggagctgcacggcaaccccttcgagtgcacctgcgacatcggcgacttcagaagatggatggacgagcacctgaacgtgaagatccccagactggtggacgtgatctgcgccagccccggcgaccagagaggcaagagcatcgtgagcctggagctgaccacctgcgtgagcgacgtgaccgccgtgatcctgttcttcttcaccttcttcatcaccaccatggtgatgctggccgccctggcccaccacctgttctactgggacgtgtggttcatctacaacgtgtgcctggccaaggtgaagggctacagaagcctgagcaccagccagaccttctacgacgcctacgtgagctacgacaccaaggacgccagcgtgaccgactgggtgatcaacgagctgagataccacctggaggagagcagagacaagaacgtgctgctgtgcctggaggagagagactgggaccccggcctggccatcatcgacaacctgatgcagagcatcaaccagagcaagaagaccgtgttcgtgctgaccaagaagtacgccaagagctggaacttcaagaccgccttctacctggccctgcagagactgatggacgagaacatggacgtgatcatcttcatcctgctggagcccgtgctgcagcacagccagtacctgagactgagacagagaatctgcaagagcagcatcctgcagtggcccgacaaccccaaggccgagggcctgttctggcagaccctgagaaacgtggtgctgaccgagaacgacagcagatacaacaacatgtacgtggacagcatcaagcagtactga

SEQ ID NO: 9787 - RNA, 3126 nt, synthetic construct
  misc_feature 1..3126: note = derived and/or modified sequence opt5 fromTLR8__Homo_sapiens__AAI01076
  source 1..3126: mol_type = other RNA
atggagaacatgttcctgcagagctccatgctgacctgcatctttctgcttatttctggcagctgtgaactgtgcgccgaggaaaatttctccagatcttacccctgtgacgagaagaaacaaaacgatagcgtgatcgctgaatgctccaatcggcgcctccaggaggtccctcagacagttgggaagtatgtgacggagctggacctttctgataactttattacccacatcacaaatgaatccttccagggactgcaaaacctcaccaaaattaatctgaaccataatccgaacgtgcagcaccagaatggcaaccccgggatccagtccaatggactgaacatcacagacggcgcctttctcaatctgaagaaccttagagagctgctcctggaagataaccaacttcctcagattcccagcgggctgcctgagtctctcaccgagctgtccctgatccagaataacatttacaatatcacaaaagaaggaattagccggctcatcaacctgaagaatctttatctggcgtggaactgttacttcaataaggtctgcgagaaaaccaacattgaagacggcgtgtttgagacgctcaccaatctggaacttctgtctctctccttcaacagcctgtctcatgttccccctaagctgccgtccagcctccgcaaactgtttctttccaatacacagatcaagtatatctctgaggaggatttcaaaggcctgattaacctcaccctgcttgacctgagcgggaattgtcccagatgctttaacgctcctttcccctgtgtgccttgcgatggaggcgcctccatcaatattgaccggtttgccttccaaaacctcacacagctgcgctacctgaacctcagctctacctccctgagaaagatcaatgctgcctggttcaagaacatgccccaccttaaagtcctggatctcgaatttaattatctggtgggggagattgctagcggagccttcctgacgatgcttccgcggctcgaaatcctggacctgtcttttaactacatcaagggcagctaccctcagcatattaatatctcccgcaacttctctaaactcctgagccttagagcgctgcacctccgggggtatgtttttcaagagctgcgcgaagatgacttccagcccctgatgcagcttcctaatctctccacaattaacctgggaatcaattttattaagcagatcgacttcaaactgtttcaaaacttcagcaatctcgagatcatttacctgtctgagaacagaatcagcccccttgtgaaggatacccggcagagctatgccaattcttccagctttcagcgccacattagaaaacggagatccacagacttcgaatttgatccccattctaacttctaccacttcacccgccctctgatcaagccgcagtgtgctgcctatggcaaggctctcgacctgagcctcaattccattttcttcatcggccccaaccaatttgagaaccttcctgatattgcctgcctcaatctgtctgcgaacagcaatgcccaggtcctgtccgggaccgaatttagcgctatcccccatgtgaaatacctcgacctgacaaacaatcggcttgattttgacaacgcctctgctctgacggagctctccgatctggaagtgctggaccttagctataattctcactacttcagaatcgccggagtcacccaccatctcgagtttattcagaacttcacaaatctgaaggttctgaacctctcccacaataacatctacaccctgacagataaatataatcttgagagcaagtctctggtggaactcgtgtttagcggcaaccgcctggacattctgtggaatgacgatgacaaccggtacatctccattttcaaagggcttaagaacctgaccagactcgatctgagcctcaatcgcctgaagcatatccctaacgaggcctttcttaatctgcccgcttctctcacggaactgcacatcaacgacaatatgctgaaattctttaactggacacttctgcagcaattcccgcggctcgagctgctcgatctgagaggaaataaacttctgttcctcaccgactccctgagcgattttacctcctctctgcgcacacttctgctcagccataaccggatttcccatctgccttctggcttcctcagcgaggtctcctctctgaagcaccttgacctgagctccaatctgctcaagaccatcaacaaaagcgcgctggaaacaaagacgaccacaaaactttctatgctggagctccacgggaatccctttgaatgcacctgtgatattggagacttcagacgctggatggatgagcacctgaacgtgaagatccctcggctcgttgacgtgatttgcgcctcccccggcgatcagagaggcaagagcatcgtctctctggaacttacaacctgtgtgtccgacgttacggctgtgatcctgtttttctttaccttctttattacaaccatggtcatgctggccgccctcgctcatcacctgttctattgggacgtgtggtttatctacaatgtctgccttgccaaagtgaaggggtatcggagcctgtctacatcccagaccttctacgatgcgtatgttagctacgacacgaaagatgcttccgtgacagactgggtcattaacgagctccgctaccacctggaggaaagcagagataagaatgtgctcctgtgtcttgaggaacgggactgggatcctggactggccatcattgacaacctgatgcagtctatcaatcaaagcaagaaaaccgttttcgtgctcacaaagaaatatgccaagtcctggaactttaaaaccgctttctacctggcccttcagagactgatggatgagaacatggacgtcatcatttttatcctcctggaacccgtgctccagcattctcaatatctgcgccttcggcagagaatttgcaagagctccatcctgcagtggccggataatcctaaagctgagggcctgttctggcagaccctccgcaacgtggttctgacagagaatgactctagatacaacaatatgtatgtcgatagcattaagcaatactga

SEQ ID NO: 9788 - protein, 1041 aa, synthetic construct [sequence omitted]

SEQ ID NO: 9789 - RNA, 3126 nt, synthetic construct
  misc_feature 1..3126: note = TLR8__Homo_sapiens__AAI01075
  source 1..3126: mol_type = other RNA
atggaaaacatgttccttcagtcgtcaatgctgacctgcattttcctgctaatatctggttcctgtgagttatgcgccgaagaaaatttttctagaagctatccttgtgatgagaaaaagcaaaatgactcagttattgcagagtgcagcaatcgtcgactacaggaagttccccaaacggtgggcaaatatgtgacagaactagacctgtctgataatttcatcacacacataacgaatgaatcatttcaagggctgcaaaatctcactaaaataaatctaaaccacaaccccaatgtacagcaccagaacggaaatcccggtatacaatcaaatggcttgaatatcacagacggggcattcctcaacctaaaaaacctaagggagttactgcttgaagacaaccagttaccccaaataccctctggtttgccagagtctttgacagaacttagtctaattcaaaacaatatatacaacataactaaagagggcatttcaagacttataaacttgaaaaatctctatttggcctggaactgctattttaacaaagtttgcgagaaaactaacatagaagatggagtatttgaaacgctgacaaatttggagttgctatcactatctttcaattctctttcacatgtgccacccaaactgccaagctccctacgcaaactttttctgagcaacacccagatcaaatacattagtgaagaagatttcaagggattgataaatttaacattactagatttaagcgggaactgtccgaggtgcttcaatgccccatttccatgcgtgccttgtgatggtggtgcttcaattaatatagatcgttttgcttttcaaaacttgacccaacttcgatacctaaacctctctagcacttccctcaggaagattaatgctgcctggtttaaaaatatgcctcatctgaaggtgctggatcttgaattcaactatttagtgggagaaatagcctctggggcatttttaacgatgctgccccgcttagaaatacttgacttgtcttttaactatataaaggggagttatccacagcatattaatatttccagaaacttctctaaacttttgtctctacgggcattgcatttaagaggttatgtgttccaggaactcagagaagatgatttccagcccctgatgcagcttccaaacttatcgactatcaacttgggtattaattttattaagcaaatcgatttcaaacttttccaaaatttctccaatctggaaattatttacttgtcagaaaacagaatatcaccgttggtaaaagatacccggcagagttatgcaaatagttcctcttttcaacgtcatatccggaaacgacgctcaacagattttgagtttgacccacattcgaacttttatcatttcacccgtcctttaataaagccacaatgtgctgcttatggaaaagccttagatttaagcctcaacagtattttcttcattgggccaaaccaatttgaaaatcttcctgacattgcctgtttaaatctgtctgcaaatagcaatgctcaagtgttaagtggaactgaattttcagccattcctcatgtcaaatatttggatttgacaaacaatagactagactttgataatgctagtgctcttactgaattgtccgacttggaagttctagatctcagctataattcacactatttcagaatagcaggcgtaacacatcatctagaatttattcaaaatttcacaaatctaaaagttttaaacttgagccacaacaacatttatactttaacagataagtataacctggaaagcaagtccctggtagaattagttttcagtggcaatcgccttgacattttgtggaatgatgatgacaacaggtatatctccattttcaaaggtctcaagaatctgacacgtctggatttatcccttaataggctcaagcacatcccaaatgaagcattccttaatttgccagcgagtctcactgaactacatataaatgataatatgttaaagttttttaactggacattactccagcagtttcctcgtctcgagttgcttgacttacgtggaaacaaactactctttttaactgatagcctatctgactttacatcttcccttcggacactgctgctgagtcataacaggatttcccacctaccctctggctttctttctgaagtcagtagtctgaagcacctcgatttaagttccaatctgctaaaaacaataaacaaatccgcacttgaaactaagaccaccaccaaattatctatgttggaactacacggaaacccctttgaatgcacctgtgacattggagatttccgaagatggatggatgaacatctgaatgtcaaaattcccagactggtagatgtcatttgtgccagtcctggggatcaaagagggaagagtattgtgagtctggagctaacaacttgtgtttcagatgtcactgcagtgatattatttttcttcacgttctttatcaccaccatggttatgttggctgccctggctcaccatttgttttactgggatgtttggtttatatataatgtgtgtttagctaaggtaaaaggctacaggtctctttccacatcccaaactttctatgatgcttacatttcttatgacaccaaagatgcctctgttactgactgggtgataaatgagctgtgctaccaccttgaagagagccgagacaaaaacgttctcctttgtctagaggagagggattgggacccgggattggccatcatcgacaacctcatgcagagcatcaaccaaagcaagaaaacagtatttgttttaaccaaaaaatatgcaaaaagctggaactttaaaacagctttttacttggctttgcagaggctaatggatgagaacatggatgtgattatatttatcctgctggagccagtgttacagcattctcagtatttgaggctacggcagcggatctgtaagagctccatcctccagtggcctgacaacccgaaggcagaaggcttgttttggcaaactctgagaaatgtggtcttgactgaaaatgattcacggtataacaatatgtatgtcgattccattaagcaatactaa

SEQ ID NO: 9790 - RNA, 3126 nt, synthetic construct
  misc_feature 1..3126: note = derived and/or modified sequence opt1 fromTLR8__Homo_sapiens__AAI01075
  source 1..3126: mol_type = other RNA
atggagaacatgttcctgcagagctccatgctgacctgcatcttcctgctgatcagcggctcctgcgagctctgcgccgaggagaacttcagccgctcctacccctgcgacgagaagaagcagaacgacagcgtgatcgccgagtgctccaaccggcgcctgcaggaggtcccgcagaccgtggggaagtacgtgacggagctggacctcagcgacaacttcatcacccacatcaccaacgagtccttccagggcctgcagaacctgaccaagatcaacctcaaccacaaccccaacgtccagcaccagaacgggaaccccggcatccagagcaacgggctgaacatcacggacggcgcgttcctgaacctcaagaacctgcgggagctgctcctggaggacaaccagctgccccagatcccgtccggcctccccgagagcctgaccgagctgtccctcatccagaacaacatctacaacatcaccaaggaggggatcagccgcctgatcaacctgaagaacctctacctggcctggaactgctacttcaacaaggtgtgcgagaagaccaacatcgaggacggcgtgttcgagacgctgaccaacctcgagctgctgtccctcagcttcaactccctgagccacgtcccgcccaagctgccctccagcctccggaagctgttcctgagcaacacccagatcaagtacatctccgaggaggacttcaaggggctcatcaacctgaccctgctcgacctgagcggcaactgcccccgctgcttcaacgcccccttcccctgcgtgccgtgcgacgggggcgcctccatcaacatcgaccggttcgccttccagaacctgacgcagctccgctacctgaacctgagctccaccagcctccggaagatcaacgcggcctggttcaagaacatgccccacctgaaggtgctggacctcgagttcaactacctggtcggcgagatcgcctccggggccttcctgaccatgctgccccgcctcgagatcctggacctgagcttcaactacatcaagggctcctacccccagcacatcaacatcagccggaacttctccaagctcctgagcctgcgcgcgctccacctccgggggtacgtgttccaggagctgcgcgaggacgacttccagccgctcatgcagctgcccaacctgtccaccatcaacctcggcatcaacttcatcaagcagatcgacttcaagctgttccagaacttcagcaacctggagatcatctacctctccgagaaccggatcagccccctggtgaaggacacgcgccagtcctacgccaacagctccagcttccagcggcacatccgcaagcggcgcagcaccgacttcgagttcgacccccactccaacttctaccacttcacccggccgctgatcaagccccagtgcgccgcctacggcaaggccctcgacctgagcctgaactccatcttcttcatcgggcccaaccagttcgagaacctccccgacatcgcgtgcctgaacctgagcgccaactccaacgcccaggtcctcagcggcaccgagttctccgccatcccgcacgtgaagtacctggacctgacgaacaaccgcctcgacttcgacaacgccagcgcgctgaccgagctgtccgacctcgaggtgctggacctgagctacaactcccactacttccgcatcgccggggtcacccaccacctcgagttcatccagaacttcaccaacctgaaggtgctgaacctcagccacaacaacatctacacgctgaccgacaagtacaacctggagtccaagagcctcgtggagctggtcttctccggcaaccggctggacatcctctggaacgacgacgacaaccgctacatcagcatcttcaaggggctgaagaacctgacccggctcgacctgtccctgaaccgcctcaagcacatccccaacgaggccttcctgaacctgcccgccagcctcaccgagctgcacatcaacgacaacatgctgaagttcttcaactggacgctcctgcagcagttcccccggctggagctcctggacctgcgcggcaacaagctcctgttcctgaccgacagcctctccgacttcaccagctccctgcggaccctgctcctgagccacaaccgcatctcccacctcccgagcggcttcctgtccgaggtgagctccctgaagcacctggacctcagctccaacctgctgaagacgatcaacaagagcgccctcgagaccaagaccaccacgaagctgtccatgctggagctccacgggaaccccttcgagtgcacgtgcgacatcggcgacttccggcgctggatggacgagcacctgaacgtgaagatcccccggctggtcgacgtgatctgcgcgagcccgggggaccagcgcggcaagtccatcgtgagcctcgagctgacgacctgcgtctccgacgtgaccgccgtcatcctgttcttcttcaccttcttcatcaccaccatggtgatgctcgccgccctggcccaccacctgttctactgggacgtgtggttcatctacaacgtctgcctcgcgaaggtgaaggggtaccggagcctgtccaccagccagaccttctacgacgcctacatcagctacgacaccaaggacgcctccgtgaccgactgggtcatcaacgagctgtgctaccacctcgaggagagccgcgacaagaacgtgctgctgtgcctcgaggagcgggactgggaccccggcctggccatcatcgacaacctgatgcagtccatcaaccagagcaagaagaccgtgttcgtcctgacgaagaagtacgcgaagtcctggaacttcaagaccgccttctacctcgccctgcagcgcctgatggacgagaacatggacgtgatcatcttcatcctcctggagcccgtgctgcagcacagccagtacctccggctgcgccagcggatctgcaagtccagcatcctgcagtggcccgacaacccgaaggccgagggcctcttctggcagaccctgcgcaacgtcgtgctgaccgagaacgactcccgctacaacaacatgtacgtggacagcatcaagcagtactga

SEQ ID NO: 9791 - RNA, 3126 nt, synthetic construct
  misc_feature 1..3126: note = derived and/or modified sequence opt2 fromTLR8__Homo_sapiens__AAI01075
  source 1..3126: mol_type = other RNA
atggagaacatgttcctccagtcctccatgctcacctgcatcttcctcctcatctccggctcctgcgagctctgcgccgaggagaacttctcccgctcctacccctgcgacgagaagaagcagaacgactccgtcatcgccgagtgctccaaccgccgcctccaggaggtcccccagaccgtcggcaagtacgtcaccgagctcgacctctccgacaacttcatcacccacatcaccaacgagtccttccagggcctccagaacctcaccaagatcaacctcaaccacaaccccaacgtccagcaccagaacggcaaccccggcatccagtccaacggcctcaacatcaccgacggcgccttcctcaacctcaagaacctccgcgagctcctcctcgaggacaaccagctcccccagatcccctccggcctccccgagtccctcaccgagctctccctcatccagaacaacatctacaacatcaccaaggagggcatctcccgcctcatcaacctcaagaacctctacctcgcctggaactgctacttcaacaaggtctgcgagaagaccaacatcgaggacggcgtcttcgagaccctcaccaacctcgagctcctctccctctccttcaactccctctcccacgtcccccccaagctcccctcctccctccgcaagctcttcctctccaacacccagatcaagtacatctccgaggaggacttcaagggcctcatcaacctcaccctcctcgacctctccggcaactgcccccgctgcttcaacgcccccttcccctgcgtcccctgcgacggcggcgcctccatcaacatcgaccgcttcgccttccagaacctcacccagctccgctacctcaacctctcctccacctccctccgcaagatcaacgccgcctggttcaagaacatgccccacctcaaggtcctcgacctcgagttcaactacctcgtcggcgagatcgcctccggcgccttcctcaccatgctcccccgcctcgagatcctcgacctctccttcaactacatcaagggctcctacccccagcacatcaacatctcccgcaacttctccaagctcctctccctccgcgccctccacctccgcggctacgtcttccaggagctccgcgaggacgacttccagcccctcatgcagctccccaacctctccaccatcaacctcggcatcaacttcatcaagcagatcgacttcaagctcttccagaacttctccaacctcgagatcatctacctctccgagaaccgcatctcccccctcgtcaaggacacccgccagtcctacgccaactcctcctccttccagcgccacatccgcaagcgccgctccaccgacttcgagttcgacccccactccaacttctaccacttcacccgccccctcatcaagccccagtgcgccgcctacggcaaggccctcgacctctccctcaactccatcttcttcatcggccccaaccagttcgagaacctccccgacatcgcctgcctcaacctctccgccaactccaacgcccaggtcctctccggcaccgagttctccgccatcccccacgtcaagtacctcgacctcaccaacaaccgcctcgacttcgacaacgcctccgccctcaccgagctctccgacctcgaggtcctcgacctctcctacaactcccactacttccgcatcgccggcgtcacccaccacctcgagttcatccagaacttcaccaacctcaaggtcctcaacctctcccacaacaacatctacaccctcaccgacaagtacaacctcgagtccaagtccctcgtcgagctcgtcttctccggcaaccgcctcgacatcctctggaacgacgacgacaaccgctacatctccatcttcaagggcctcaagaacctcacccgcctcgacctctccctcaaccgcctcaagcacatccccaacgaggccttcctcaacctccccgcctccctcaccgagctccacatcaacgacaacatgctcaagttcttcaactggaccctcctccagcagttcccccgcctcgagctcctcgacctccgcggcaacaagctcctcttcctcaccgactccctctccgacttcacctcctccctccgcaccctcctcctctcccacaaccgcatctcccacctcccctccggcttcctctccgaggtctcctccctcaagcacctcgacctctcctccaacctcctcaagaccatcaacaagtccgccctcgagaccaagaccaccaccaagctctccatgctcgagctccacggcaaccccttcgagtgcacctgcgacatcggcgacttccgccgctggatggacgagcacctcaacgtcaagatcccccgcctcgtcgacgtcatctgcgcctcccccggcgaccagcgcggcaagtccatcgtctccctcgagctcaccacctgcgtctccgacgtcaccgccgtcatcctcttcttcttcaccttcttcatcaccaccatggtcatgctcgccgccctcgcccaccacctcttctactgggacgtctggttcatctacaacgtctgcctcgccaaggtcaagggctaccgctccctctccacctcccagaccttctacgacgcctacatctcctacgacaccaaggacgcctccgtcaccgactgggtcatcaacgagctctgctaccacctcgaggagtcccgcgacaagaacgtcctcctctgcctcgaggagcgcgactgggaccccggcctcgccatcatcgacaacctcatgcagtccatcaaccagtccaagaagaccgtcttcgtcctcaccaagaagtacgccaagtcctggaacttcaagaccgccttctacctcgccctccagcgcctcatggacgagaacatggacgtcatcatcttcatcctcctcgagcccgtcctccagcactcccagtacctccgcctccgccagcgcatctgcaagtcctccatcctccagtggcccgacaaccccaaggccgagggcctcttctggcagaccctccgcaacgtcgtcctcaccgagaacgactcccgctacaacaacatgtacgtcgactccatcaagcagtactga

SEQ ID NO: 9792 - RNA, 3126 nt, synthetic construct
  misc_feature 1..3126: note = derived and/or modified sequence opt3 fromTLR8__Homo_sapiens__AAI01075
  source 1..3126: mol_type = other RNA
atggagaacatgttcctgcagagctccatgttgacctgcatctttcttctgatttctggctcatgtgaattgtgcgccgaggaaaatttcagtagaagctacccctgtgacgagaagaaacaaaacgattccgtgatagctgaatgctctaataggcggttacaggaggtccctcagacagttgggaagtatgtgactgagctggacctatcggataactttatcacgcacattaccaatgaatcattccagggactccaaaacctgacaaaaatcaatcttaaccataatccaaacgtacagcaccagaatggtaacccgggcattcagagcaatgggctgaacatcactgacggagcatttttgaatctcaagaacctgcgcgagctgctcttagaagataaccaactgccccagatacctagtggccttccagagtccttgaccgagctgtctctaatccagaataacatttacaatatcacaaaagaaggtattagccgactcatcaacctgaagaatctttatctggcctggaactgttacttcaataaggtgtgcgagaaaaccaacatagaagacggggtctttgagactttgacaaatctcgaactgttatccctgtcattcaacagtctcagccatgtgccccctaaacttccatcttccctgcgtaagttgtttctatcaaatacccagattaagtatatcagcgaggaggatttcaaaggactgattaacctcacgctgcttgacctgagtggcaattgtcccagatgctttaacgcgcctttcccatgtgttccgtgcgatggcggggcttctatcaatatcgacaggtttgccttccaaaacttgactcagctccggtacctgaacttatccagcacctcgctgcgcaagattaatgcagcctggttcaagaacatgccccacctaaaagtgctcgatctggaatttaattatcttgtcggagagatagcttctggtgcattcttgacaatgctgcctagactcgaaatcctggacctttcctttaactacattaagggctcatacccacagcatatcaatataagtaggaacttcagcaaactgttgtccctccgggccctgcacttacgcgggtatgtgtttcaagagctgcgagaagatgacttccagcccctaatgcagctccctaatctgtctactattaaccttggaatcaattttatcaagcagattgacttcaaattgtttcaaaacttcagcaatctggagatcatttacctctcagagaacagaataagtccactggtaaaggataccaggcagtcctatgctaattcttcttcatttcagcggcacatccgtaaacgcagaagtacagacttcgaatttgatccccatagcaacttctaccacttcaccaggccgttaattaagcctcagtgtgccgcgtatggcaaggcactggacctttccttgaatagcatctttttcatcggtcccaaccaatttgagaacctcccagatattgcctgcctgaatctatcggctaacagcaatgcccaggttctgtccgggacggaattttcagcaatacctcatgtgaaatacctcgacctgactaacaatcggcttgattttgacaacgctagtgccttgacagagctgtctgatttagaagtcctcgacctgagctataattcccactacttccgaatcgcgggagtgacccaccatcttgagtttattcagaacttcactaatctgaaggtgttgaacctctcacacaataacatctacacactgaccgataaatataatctagagagcaagtctctggtcgaactcgttttctccggcaaccgcctggacattctttggaatgacgatgacaacagatacatcagtatattcaaaggcttgaagaacctgacgaggttagatctcagcctgaatcggcttaagcatatccccaacgaggcctttctgaatctaccagcatctctcaccgaactgcacattaacgacaatatgttgaaattctttaactggacactgttacagcaattcccccgcctcgagctgcttgatctgagagggaataagctcctcttcctgactgactccctatcagattttaccagtagcctgaggacacttctcctgtcgcataaccgtatctcccacttgccttctggattcctgagcgaggtgtcaagtttaaaacacctcgacctgtcctctaatcttctgaagactattaacaaaagcgctttggaaaccaagacaaccactaagctctccatgctggagctacatggtaatccatttgaatgcacgtgtgatatcggcgacttccggcgatggatggatgagcacctgaacgtaaaaataccgagacttgtggacgtcatttgcgcctcacccggggatcagaggggaaagagcatcgtgagtctcgaactgacaacctgtgtttctgacgtgactgctgtcattttgtttttctttaccttctttatcacaaccatggtgatgttagccgcactggcccatcacctcttctattgggacgtatggtttatatacaatgtttgcctggctaaagtgaagggctatcgctcccttagcacttcgcagacattctacgatgcgtatatctcatacgacacgaaagatgcatctgtcaccgactgggtgattaacgagctgtgttaccacttggaggaaagtcgggataagaatgtcctactgtgcctcgaggaaagagactgggatcctggtctggccatcattgacaaccttatgcagtccatcaatcaaagcaagaaaactgtgttcgttttaacaaagaaatatgctaagtcttggaactttaaaaccgccttctacctggcactccagaggttgatggatgagaacatggacgtgataatttttatcctgctcgaaccagtactgcagcatagccaatatcttcgcctgcgacagcggatctgtaagtcctcaattttgcagtggcccgataatcctaaagccgaggggctattctggcagacactgcgtaacgtcgtgctcactgagaatgacagtagatacaacaatatgtatgttgatagcatcaagcaatactga

SEQ ID NO: 9793 - RNA, 3126 nt, synthetic construct
  misc_feature 1..3126: note = derived and/or modified sequence opt4 fromTLR8__Homo_sapiens__AAI01075
  source 1..3126: mol_type = other RNA
atggagaacatgttcctgcagagcagcatgctgacctgcatcttcctgctgatcagcggcagctgcgagctgtgcgccgaggagaacttcagcagaagctacccctgcgacgagaagaagcagaacgacagcgtgatcgccgagtgcagcaacagaagactgcaggaggtgccccagaccgtgggcaagtacgtgaccgagctggacctgagcgacaacttcatcacccacatcaccaacgagagcttccagggcctgcagaacctgaccaagatcaacctgaaccacaaccccaacgtgcagcaccagaacggcaaccccggcatccagagcaacggcctgaacatcaccgacggcgccttcctgaacctgaagaacctgagagagctgctgctggaggacaaccagctgccccagatccccagcggcctgcccgagagcctgaccgagctgagcctgatccagaacaacatctacaacatcaccaaggagggcatcagcagactgatcaacctgaagaacctgtacctggcctggaactgctacttcaacaaggtgtgcgagaagaccaacatcgaggacggcgtgttcgagaccctgaccaacctggagctgctgagcctgagcttcaacagcctgagccacgtgccccccaagctgcccagcagcctgagaaagctgttcctgagcaacacccagatcaagtacatcagcgaggaggacttcaagggcctgatcaacctgaccctgctggacctgagcggcaactgccccagatgcttcaacgcccccttcccctgcgtgccctgcgacggcggcgccagcatcaacatcgacagattcgccttccagaacctgacccagctgagatacctgaacctgagcagcaccagcctgagaaagatcaacgccgcctggttcaagaacatgccccacctgaaggtgctggacctggagttcaactacctggtgggcgagatcgccagcggcgccttcctgaccatgctgcccagactggagatcctggacctgagcttcaactacatcaagggcagctacccccagcacatcaacatcagcagaaacttcagcaagctgctgagcctgagagccctgcacctgagaggctacgtgttccaggagctgagagaggacgacttccagcccctgatgcagctgcccaacctgagcaccatcaacctgggcatcaacttcatcaagcagatcgacttcaagctgttccagaacttcagcaacctggagatcatctacctgagcgagaacagaatcagccccctggtgaaggacaccagacagagctacgccaacagcagcagcttccagagacacatcagaaagagaagaagcaccgacttcgagttcgacccccacagcaacttctaccacttcaccagacccctgatcaagccccagtgcgccgcctacggcaaggccctggacctgagcctgaacagcatcttcttcatcggccccaaccagttcgagaacctgcccgacatcgcctgcctgaacctgagcgccaacagcaacgcccaggtgctgagcggcaccgagttcagcgccatcccccacgtgaagtacctggacctgaccaacaacagactggacttcgacaacgccagcgccctgaccgagctgagcgacctggaggtgctggacctgagctacaacagccactacttcagaatcgccggcgtgacccaccacctggagttcatccagaacttcaccaacctgaaggtgctgaacctgagccacaacaacatctacaccctgaccgacaagtacaacctggagagcaagagcctggtggagctggtgttcagcggcaacagactggacatcctgtggaacgacgacgacaacagatacatcagcatcttcaagggcctgaagaacctgaccagactggacctgagcctgaacagactgaagcacatccccaacgaggccttcctgaacctgcccgccagcctgaccgagctgcacatcaacgacaacatgctgaagttcttcaactggaccctgctgcagcagttccccagactggagctgctggacctgagaggcaacaagctgctgttcctgaccgacagcctgagcgacttcaccagcagcctgagaaccctgctgctgagccacaacagaatcagccacctgcccagcggcttcctgagcgaggtgagcagcctgaagcacctggacctgagcagcaacctgctgaagaccatcaacaagagcgccctggagaccaagaccaccaccaagctgagcatgctggagctgcacggcaaccccttcgagtgcacctgcgacatcggcgacttcagaagatggatggacgagcacctgaacgtgaagatccccagactggtggacgtgatctgcgccagccccggcgaccagagaggcaagagcatcgtgagcctggagctgaccacctgcgtgagcgacgtgaccgccgtgatcctgttcttcttcaccttcttcatcaccaccatggtgatgctggccgccctggcccaccacctgttctactgggacgtgtggttcatctacaacgtgtgcctggccaaggtgaagggctacagaagcctgagcaccagccagaccttctacgacgcctacatcagctacgacaccaaggacgccagcgtgaccgactgggtgatcaacgagctgtgctaccacctggaggagagcagagacaagaacgtgctgctgtgcctggaggagagagactgggaccccggcctggccatcatcgacaacctgatgcagagcatcaaccagagcaagaagaccgtgttcgtgctgaccaagaagtacgccaagagctggaacttcaagaccgccttctacctggccctgcagagactgatggacgagaacatggacgtgatcatcttcatcctgctggagcccgtgctgcagcacagccagtacctgagactgagacagagaatctgcaagagcagcatcctgcagtggcccgacaaccccaaggccgagggcctgttctggcagaccctgagaaacgtggtgctgaccgagaacgacagcagatacaacaacatgtacgtggacagcatcaagcagtactga

SEQ ID NO: 9794 - RNA, 3126 nt, synthetic construct
  misc_feature 1..3126: note = derived and/or modified sequence opt5 fromTLR8__Homo_sapiens__AAI01075
  source 1..3126: mol_type = other RNA
atggagaacatgttcctgcagagctccatgctgacctgcatctttctgcttatttctggcagctgtgaactgtgcgccgaggaaaatttctccagatcttacccctgtgacgagaagaaacaaaacgatagcgtgatcgctgaatgctccaatcggcgcctccaggaggtccctcagacagttgggaagtatgtgacggagctggacctttctgataactttattacccacatcacaaatgaatccttccagggactgcaaaacctcaccaaaattaatctgaaccataatccgaacgtgcagcaccagaatggcaaccccgggatccagtccaatggactgaacatcacagacggcgcctttctcaatctgaagaaccttagagagctgctcctggaagataaccaacttcctcagattcccagcgggctgcctgagtctctcaccgagctgtccctgatccagaataacatttacaatatcacaaaagaaggaattagccggctcatcaacctgaagaatctttatctggcgtggaactgttacttcaataaggtctgcgagaaaaccaacattgaagacggcgtgtttgagacgctcaccaatctggaacttctgtctctctccttcaacagcctgtctcatgttccccctaagctgccgtccagcctccgcaaactgtttctttccaatacacagatcaagtatatctctgaggaggatttcaaaggcctgattaacctcaccctgcttgacctgagcgggaattgtcccagatgctttaacgctcctttcccctgtgtgccttgcgatggaggcgcctccatcaatattgaccggtttgccttccaaaacctcacacagctgcgctacctgaacctcagctctacctccctgagaaagatcaatgctgcctggttcaagaacatgccccaccttaaagtcctggatctcgaatttaattatctggtgggggagattgctagcggagccttcctgacgatgcttccgcggctcgaaatcctggacctgtcttttaactacatcaagggcagctaccctcagcatattaatatctcccgcaacttctctaaactcctgagccttagagcgctgcacctccgggggtatgtttttcaagagctgcgcgaagatgacttccagcccctgatgcagcttcctaatctctccacaattaacctgggaatcaattttattaagcagatcgacttcaaactgtttcaaaacttcagcaatctcgagatcatttacctgtctgagaacagaatcagcccccttgtgaaggatacccggcagagctatgccaattcttccagctttcagcgccacattagaaaacggagatccacagacttcgaatttgatccccattctaacttctaccacttcacccgccctctgatcaagccgcagtgtgctgcctatggcaaggctctcgacctgagcctcaattccattttcttcatcggccccaaccaatttgagaaccttcctgatattgcctgcctcaatctgtctgcgaacagcaatgcccaggtcctgtccgggaccgaatttagcgctatcccccatgtgaaatacctcgacctgacaaacaatcggcttgattttgacaacgcctctgctctgacggagctctccgatctggaagtgctggaccttagctataattctcactacttcagaatcgccggagtcacccaccatctcgagtttattcagaacttcacaaatctgaaggttctgaacctctcccacaataacatctacaccctgacagataaatataatcttgagagcaagtctctggtggaactcgtgtttagcggcaaccgcctggacattctgtggaatgacgatgacaaccggtacatctccattttcaaagggcttaagaacctgaccagactcgatctgagcctcaatcgcctgaagcatatccctaacgaggcctttcttaatctgcccgcttctctcacggaactgcacatcaacgacaatatgctgaaattctttaactggacacttctgcagcaattcccgcggctcgagctgctcgatctgagaggaaataaacttctgttcctcaccgactccctgagcgattttacctcctctctgcgcacacttctgctcagccataaccggatttcccatctgccttctggcttcctcagcgaggtctcctctctgaagcaccttgacctgagctccaatctgctcaagaccatcaacaaaagcgcgctggaaacaaagacgaccacaaaactttctatgctggagctccacgggaatccctttgaatgcacctgtgatattggagacttcagacgctggatggatgagcacctgaacgtgaagatccctcggctcgttgacgtgatttgcgcctcccccggcgatcagagaggcaagagcatcgtctctctggaacttacaacctgtgtgtccgacgttacggctgtgatcctgtttttctttaccttctttattacaaccatggtcatgctggccgccctcgctcatcacctgttctattgggacgtgtggtttatctacaatgtctgccttgccaaagtgaaggggtatcggagcctgtctacatcccagaccttctacgatgcgtatattagctacgacacgaaagatgcttccgttacagactgggtgatcaacgagctctgttaccacctggaggaaagccgcgataagaatgtcctcctgtgccttgaggaaagagactgggatcctggactggccattatcgacaacctgatgcagtctatcaatcaaagcaagaaaaccgtgttcgttctcacaaagaaatatgccaagtcctggaactttaaaaccgctttctacctggcccttcagcggctgatggatgagaacatggacgtgattatctttattctcctggaacccgtcctccagcattctcaatatctgagacttcgccagcggatctgtaagagctccattctgcagtggccggataatcctaaagctgagggcctgttctggcagaccctcagaaacgtggtgctgacagagaatgactctcgctacaacaatatgtatgttgatagcatcaagcaatactga

SEQ ID NO: 9795 - protein, 1041 aa, synthetic construct
  REGION 1..1041: note = TLR8__Homo_sapiens__Q9NR97
MENMFLQSSMLTCIFLLISGSCELCAEENFSRSYPCDEKKQNDSVIAECSNRRLQEVPQTVGKYVTELDLSDNFITHITNESFQGLQNLTKINLNHNPNVQHQNGNPGIQSNGLNITDGAFLNLKNLRELLLEDNQLPQIPSGLPESLTELSLIQNNIYNITKEGISRLINLKNLYLAWNCYFNKVCEKTNIEDGVFETLTNLELLSLSFNSLSHVPPKLPSSLRKLFLSNTQIKYISEEDFKGLINLTLLDLSGNCPRCFNAPFPCVPCDGGASINIDRFAFQNLTQLRYLNLSSTSLRKINAAWFKNMPHLKVLDLEFNYLVGEIASGAFLTMLPRLEILDLSFNYIKGSYPQHINISRNFSKLLSLRALHLRGYVFQELREDDFQPLMQLPNLSTINLGINFIKQIDFKLFQNFSNLEIIYLSENRISPLVKDTRQSYANSSSFQRHIRKRRSTDFEFDPHSNFYHFTRPLIKPQCAAYGKALDLSLNSIFFIGPNQFENLPDIACLNLSANSNAQVLSGTEFSAIPHVKYLDLTNNRLDFDNASALTELSDLEVLDLSYNSHYFRIAGVTHHLEFIQNFTNLKVLNLSHNNIYTLTDKYNLESKSLVELVFSGNRLDILWNDDDNRYISIFKGLKNLTRLDLSLNRLKHIPNEAFLNLPASLTELHINDNMLKFFNWTLLQQFPRLELLDLRGNKLLFLTDSLSDFTSSLRTLLLSHNRISHLPSGFLSEVSSLKHLDLSSNLLKTINKSALETKTTTKLSMLELHGNPFECTCDIGDFRRWMDEHLNVKIPRLVDVICASPGDQRGKSIVSLELTTCVSDVTAVILFFFTFFITTMVMLAALAHHLFYWDVWFIYNVCLAKVKGYRSLSTSQTFYDAYISYDTKDASVTDWVINELRYHLEESRDKNVLLCLEERDWDPGLAIIDNLMQSINQSKKTVFVLTKKYAKSWNFKTAFYLALQRLMDENMDVIIFILLEPVLQHSQYLRLRQRICKSSILQWPDNPKAEGLFWQTLRNVVLTENDSRYNNMYVDSIKQY

SEQ ID NO: 9796 - RNA, 3126 nt, synthetic construct
  misc_feature 1..3126: note = TLR8__Homo_sapiens__AAF78036
  source 1..3126: mol_type = other RNA
atggaaaacatgttccttcagtcgtcaatgctgacctgcattttcctgctaatatctggttcctgtgagttatgcgccgaagaaaatttttctagaagctatccttgtgatgagaaaaagcaaaatgactcagttattgcagagtgcagcaatcgtcgactacaggaagttccccaaacggtgggcaaatatgtgacagaactagacctgtctgataatttcatcacacacataacgaatgaatcatttcaagggctgcaaaatctcactaaaataaatctaaaccacaaccccaatgtacagcaccagaacggaaatcccggtatacaatcaaatggcttgaatatcacagacggggcattcctcaacctaaaaaacctaagggagttactgcttgaagacaaccagttaccccaaataccctctggtttgccagagtctttgacagaacttagtctaattcaaaacaatatatacaacataactaaagagggcatttcaagacttataaacttgaaaaatctctatttggcctggaactgctattttaacaaagtttgcgagaaaactaacatagaagatggagtatttgaaacgctgacaaatttggagttgctatcactatctttcaattctctttcacacgtgccacccaaactgccaagctccctacgcaaactttttctgagcaacacccagatcaaatacattagtgaagaagatttcaagggattgataaatttaacattactagatttaagcgggaactgtccgaggtgcttcaatgccccatttccatgcgtgccttgtgatggtggtgcttcaattaatatagatcgttttgcttttcaaaacttgacccaacttcgatacctaaacctctctagcacttccctcaggaagattaatgctgcctggtttaaaaatatgcctcatctgaaggtgctggatcttgaattcaactatttagtgggagaaatagcctctggggcatttttaacgatgctgccccgcttagaaatacttgacttgtcttttaactatataaaggggagttatccacagcatattaatatttccagaaacttctctaaacttttgtctctacgggcattgcatttaagaggttatgtgttccaggaactcagagaagatgatttccagcccctgatgcagcttccaaacttatcgactatcaacttgggtattaattttattaagcaaatcgatttcaaacttttccaaaatttctccaatctggaaattatttacttgtcagaaaacagaatatcaccgttggtaaaagatacccggcagagttatgcaaatagttcctcttttcaacgtcatatccggaaacgacgctcaacagattttgagtttgacccacattcgaacttttatcatttcacccgtcctttaataaagccacaatgtgctgcttatggaaaagccttagatttaagcctcaacagtattttcttcattgggccaaaccaatttgaaaatcttcctgacattgcctgtttaaatctgtctgcaaatagcaatgctcaagtgttaagtggaactgaattttcagccattcctcatgtcaaatatttggatttgacaaacaatagactagactttgataatgctagtgctcttactgaattgtccgacttggaagttctagatctcagctataattcacactatttcagaatagcaggcgtaacacatcatctagaatttattcaaaatttcacaaatctaaaagttttaaacttgagccacaacaacatttatactttaacagataagtataacctggaaagcaagtccctggtagaattagttttcagtggcaatcgccttgacattttgtggaatgatgatgacaacaggtatatctccattttcaaaggtctcaagaatctgacacgtctggatttatcccttaataggctgaagcacatcccaaatgaagcattccttaatttgccagcgagtctcactgaactacatataaatgataatatgttaaagttttttaactggacattactccagcagttccctcgtctcgagttgcttgacttacgtggaaacaaactactctttttaactgatagcctatctgactttacatcttcccttcggacactgctgctgagtcataacaggatttcccacctaccctctggctttctttctgaagtcagtagtctgaagcacctcgatttaagttccaatctgctaaaaacaatcaacaaatccgcacttgaaactaagaccaccaccaaattatctatgttggaactacacggaaacccctttgaatgcacctgtgacattggagatttccgaagatggatggatgaacatctgaatgtcaaaattcccagactggtagatgtcatttgtgccagtcctggggatcaaagagggaagagtattgtgagtctggagctgacaacttgtgtttcagatgtcactgcagtgatattatttttcttcacgttctttatcaccaccatggttatgttggctgccctggctcaccatttgttttactgggatgtttggtttatatataatgtgtgtttagctaaggtaaaaggctacaggtctctttccacatcccaaactttctatgatgcttacatttcttatgacaccaaagatgcctctgttactgactgggtgataaatgagctgcgctaccaccttgaagagagccgagacaaaaacgttctcctttgtctagaggagagggattgggacccgggattggccatcatcgacaacctcatgcagagcatcaaccaaagcaagaaaacagtatttgttttaaccaaaaaatatgcaaaaagctggaactttaaaacagctttttacttggctttgcagaggctaatggatgagaacatggatgtgattatatttatcctgctggagccagtgttacagcattctcagtatttgaggctacggcagcggatctgtaagagctccatcctccagtggcctgacaacccgaaggcagaaggcttgttttggcaaactctgagaaatgtggtcttgactgaaaatgattcacggtataacaatatgtatgtcgattccattaagcaatactaa

SEQ ID NO: 9797 - RNA, 3126 nt, synthetic construct
  misc_feature 1..3126: note = derived and/or modified sequence opt1 fromTLR8__Homo_sapiens__AAF78036
  source 1..3126: mol_type = other RNA
atggagaacatgttcctgcagagctccatgctgacctgcatcttcctgctgatcagcggctcctgcgagctctgcgccgaggagaacttcagccgctcctacccctgcgacgagaagaagcagaacgacagcgtgatcgccgagtgctccaaccggcgcctgcaggaggtcccgcagaccgtggggaagtacgtgacggagctggacctcagcgacaacttcatcacccacatcaccaacgagtccttccagggcctgcagaacctgaccaagatcaacctcaaccacaaccccaacgtccagcaccagaacgggaaccccggcatccagagcaacgggctgaacatcacggacggcgcgttcctgaacctcaagaacctgcgggagctgctcctggaggacaaccagctgccccagatcccgtccggcctccccgagagcctgaccgagctgtccctcatccagaacaacatctacaacatcaccaaggaggggatcagccgcctgatcaacctgaagaacctctacctggcctggaactgctacttcaacaaggtgtgcgagaagaccaacatcgaggacggcgtgttcgagacgctgaccaacctcgagctgctgtccctcagcttcaactccctgagccacgtcccgcccaagctgccctccagcctccggaagctgttcctgagcaacacccagatcaagtacatctccgaggaggacttcaaggggctcatcaacctgaccctgctcgacctgagcggcaactgcccccgctgcttcaacgcccccttcccctgcgtgccgtgcgacgggggcgcctccatcaacatcgaccggttcgccttccagaacctgacgcagctccgctacctgaacctgagctccaccagcctccggaagatcaacgcggcctggttcaagaacatgccccacctgaaggtgctggacctcgagttcaactacctggtcggcgagatcgcctccggggccttcctgaccatgctgccccgcctcgagatcctggacctgagcttcaactacatcaagggctcctacccccagcacatcaacatcagccggaacttctccaagctcctgagcctgcgcgcgctccacctccgggggtacgtgttccaggagctgcgcgaggacgacttccagccgctcatgcagctgcccaacctgtccaccatcaacctcggcatcaacttcatcaagcagatcgacttcaagctgttccagaacttcagcaacctggagatcatctacctctccgagaaccggatcagccccctggtgaaggacacgcgccagtcctacgccaacagctccagcttccagcggcacatccgcaagcggcgcagcaccgacttcgagttcgacccccactccaacttctaccacttcacccggccgctgatcaagccccagtgcgccgcctacggcaaggccctcgacctgagcctgaactccatcttcttcatcgggcccaaccagttcgagaacctccccgacatcgcgtgcctgaacctgagcgccaactccaacgcccaggtcctcagcggcaccgagttctccgccatcccgcacgtgaagtacctggacctgacgaacaaccgcctcgacttcgacaacgccagcgcgctgaccgagctgtccgacctcgaggtgctggacctgagctacaactcccactacttccgcatcgccggggtcacccaccacctcgagttcatccagaacttcaccaacctgaaggtgctgaacctcagccacaacaacatctacacgctgaccgacaagtacaacctggagtccaagagcctcgtggagctggtcttctccggcaaccggctggacatcctctggaacgacgacgacaaccgctacatcagcatcttcaaggggctgaagaacctgacccggctcgacctgtccctgaaccgcctcaagcacatccccaacgaggccttcctgaacctgcccgccagcctcaccgagctgcacatcaacgacaacatgctgaagttcttcaactggacgctcctgcagcagttcccccggctggagctcctggacctgcgcggcaacaagctcctgttcctgaccgacagcctctccgacttcaccagctccctgcggaccctgctcctgagccacaaccgcatctcccacctcccgagcggcttcctgtccgaggtgagctccctgaagcacctggacctcagctccaacctgctgaagacgatcaacaagagcgccctcgagaccaagaccaccacgaagctgtccatgctggagctccacgggaaccccttcgagtgcacgtgcgacatcggcgacttccggcgctggatggacgagcacctgaacgtgaagatcccccggctggtcgacgtgatctgcgcgagcccgggggaccagcgcggcaagtccatcgtgagcctcgagctgacgacctgcgtctccgacgtgaccgccgtcatcctgttcttcttcaccttcttcatcaccaccatggtgatgctcgccgccctggcccaccacctgttctactgggacgtgtggttcatctacaacgtctgcctcgcgaaggtgaaggggtaccggagcctgtccaccagccagaccttctacgacgcctacatcagctacgacaccaaggacgcctccgtgaccgactgggtcatcaacgagctgcgctaccacctcgaggagagccgggacaagaacgtgctgctgtgcctcgaggagcgcgactgggaccccggcctggccatcatcgacaacctgatgcagtccatcaaccagagcaagaagaccgtgttcgtcctgacgaagaagtacgcgaagtcctggaacttcaagaccgccttctacctcgccctgcagcggctgatggacgagaacatggacgtgatcatcttcatcctcctggagcccgtgctgcagcacagccagtacctccgcctgcggcagcgcatctgcaagtccagcatcctgcagtggcccgacaacccgaaggccgagggcctcttctggcagaccctgcgcaacgtcgtgctgaccgagaacgactcccggtacaacaacatgtacgtggacagcatcaagcagtactga

SEQ ID NO: 9798 - RNA, 3126 nt, synthetic construct
  misc_feature 1..3126: note = derived and/or modified sequence opt2 fromTLR8__Homo_sapiens__AAF78036
  source 1..3126: mol_type = other RNA
atggagaacatgttcctccagtcctccatgctcacctgcatcttcctcctcatctccggctcctgcgagctctgcgccgaggagaacttctcccgctcctacccctgcgacgagaagaagcagaacgactccgtcatcgccgagtgctccaaccgccgcctccaggaggtcccccagaccgtcggcaagtacgtcaccgagctcgacctctccgacaacttcatcacccacatcaccaacgagtccttccagggcctccagaacctcaccaagatcaacctcaaccacaaccccaacgtccagcaccagaacggcaaccccggcatccagtccaacggcctcaacatcaccgacggcgccttcctcaacctcaagaacctccgcgagctcctcctcgaggacaaccagctcccccagatcccctccggcctccccgagtccctcaccgagctctccctcatccagaacaacatctacaacatcaccaaggagggcatctcccgcctcatcaacctcaagaacctctacctcgcctggaactgctacttcaacaaggtctgcgagaagaccaacatcgaggacggcgtcttcgagaccctcaccaacctcgagctcctctccctctccttcaactccctctcccacgtcccccccaagctcccctcctccctccgcaagctcttcctctccaacacccagatcaagtacatctccgaggaggacttcaagggcctcatcaacctcaccctcctcgacctctccggcaactgcccccgctgcttcaacgcccccttcccctgcgtcccctgcgacggcggcgcctccatcaacatcgaccgcttcgccttccagaacctcacccagctccgctacctcaacctctcctccacctccctccgcaagatcaacgccgcctggttcaagaacatgccccacctcaaggtcctcgacctcgagttcaactacctcgtcggcgagatcgcctccggcgccttcctcaccatgctcccccgcctcgagatcctcgacctctccttcaactacatcaagggctcctacccccagcacatcaacatctcccgcaacttctccaagctcctctccctccgcgccctccacctccgcggctacgtcttccaggagctccgcgaggacgacttccagcccctcatgcagctccccaacctctccaccatcaacctcggcatcaacttcatcaagcagatcgacttcaagctcttccagaacttctccaacctcgagatcatctacctctccgagaaccgcatctcccccctcgtcaaggacacccgccagtcctacgccaactcctcctccttccagcgccacatccgcaagcgccgctccaccgacttcgagttcgacccccactccaacttctaccacttcacccgccccctcatcaagccccagtgcgccgcctacggcaaggccctcgacctctccctcaactccatcttcttcatcggccccaaccagttcgagaacctccccgacatcgcctgcctcaacctctccgccaactccaacgcccaggtcctctccggcaccgagttctccgccatcccccacgtcaagtacctcgacctcaccaacaaccgcctcgacttcgacaacgcctccgccctcaccgagctctccgacctcgaggtcctcgacctctcctacaactcccactacttccgcatcgccggcgtcacccaccacctcgagttcatccagaacttcaccaacctcaaggtcctcaacctctcccacaacaacatctacaccctcaccgacaagtacaacctcgagtccaagtccctcgtcgagctcgtcttctccggcaaccgcctcgacatcctctggaacgacgacgacaaccgctacatctccatcttcaagggcctcaagaacctcacccgcctcgacctctccctcaaccgcctcaagcacatccccaacgaggccttcctcaacctccccgcctccctcaccgagctccacatcaacgacaacatgctcaagttcttcaactggaccctcctccagcagttcccccgcctcgagctcctcgacctccgcggcaacaagctcctcttcctcaccgactccctctccgacttcacctcctccctccgcaccctcctcctctcccacaaccgcatctcccacctcccctccggcttcctctccgaggtctcctccctcaagcacctcgacctctcctccaacctcctcaagaccatcaacaagtccgccctcgagaccaagaccaccaccaagctctccatgctcgagctccacggcaaccccttcgagtgcacctgcgacatcggcgacttccgccgctggatggacgagcacctcaacgtcaagatcccccgcctcgtcgacgtcatctgcgcctcccccggcgaccagcgcggcaagtccatcgtctccctcgagctcaccacctgcgtctccgacgtcaccgccgtcatcctcttcttcttcaccttcttcatcaccaccatggtcatgctcgccgccctcgcccaccacctcttctactgggacgtctggttcatctacaacgtctgcctcgccaaggtcaagggctaccgctccctctccacctcccagaccttctacgacgcctacatctcctacgacaccaaggacgcctccgtcaccgactgggtcatcaacgagctccgctaccacctcgaggagtcccgcgacaagaacgtcctcctctgcctcgaggagcgcgactgggaccccggcctcgccatcatcgacaacctcatgcagtccatcaaccagtccaagaagaccgtcttcgtcctcaccaagaagtacgccaagtcctggaacttcaagaccgccttctacctcgccctccagcgcctcatggacgagaacatggacgtcatcatcttcatcctcctcgagcccgtcctccagcactcccagtacctccgcctccgccagcgcatctgcaagtcctccatcctccagtggcccgacaaccccaaggccgagggcctcttctggcagaccctccgcaacgtcgtcctcaccgagaacgactcccgctacaacaacatgtacgtcgactccatcaagcagtactga

SEQ ID NO: 9799 - RNA, 3126 nt, synthetic construct
  misc_feature 1..3126: note = derived and/or modified sequence opt3 fromTLR8__Homo_sapiens__AAF78036
  source 1..3126: mol_type = other RNA
atggagaacatgttcctgcagagctccatgttgacctgcatctttcttctgatttctggctcatgtgaattgtgcgccgaggaaaatttcagtagaagctacccctgtgacgagaagaaacaaaacgattccgtgatagctgaatgctctaataggcggttacaggaggtccctcagacagttgggaagtatgtgactgagctggacctatcggataactttatcacgcacattaccaatgaatcattccagggactccaaaacctgacaaaaatcaatcttaaccataatccaaacgtacagcaccagaatggtaacccgggcattcagagcaatgggctgaacatcactgacggagcatttttgaatctcaagaacctgcgcgagctgctcttagaagataaccaactgccccagatacctagtggccttccagagtccttgaccgagctgtctctaatccagaataacatttacaatatcacaaaagaaggtattagccgactcatcaacctgaagaatctttatctggcctggaactgttacttcaataaggtgtgcgagaaaaccaacatagaagacggggtctttgagactttgacaaatctcgaactgttatccctgtcattcaacagtctcagccatgtgccccctaaacttccatcttccctgcgtaagttgtttctatcaaatacccagattaagtatatcagcgaggaggatttcaaaggactgattaacctcacgctgcttgacctgagtggcaattgtcccagatgctttaacgcgcctttcccatgtgttccgtgcgatggcggggcttctatcaatatcgacaggtttgccttccaaaacttgactcagctccggtacctgaacttatccagcacctcgctgcgcaagattaatgcagcctggttcaagaacatgccccacctaaaagtgctcgatctggaatttaattatcttgtcggagagatagcttctggtgcattcttgacaatgctgcctagactcgaaatcctggacctttcctttaactacattaagggctcatacccacagcatatcaatataagtaggaacttcagcaaactgttgtccctccgggccctgcacttacgcgggtatgtgtttcaagagctgcgagaagatgacttccagcccctaatgcagctccctaatctgtctactattaaccttggaatcaattttatcaagcagattgacttcaaattgtttcaaaacttcagcaatctggagatcatttacctctcagagaacagaataagtccactggtaaaggataccaggcagtcctatgctaattcttcttcatttcagcggcacatccgtaaacgcagaagtacagacttcgaatttgatccccatagcaacttctaccacttcaccaggccgttaattaagcctcagtgtgccgcgtatggcaaggcactggacctttccttgaatagcatctttttcatcggtcccaaccaatttgagaacctcccagatattgcctgcctgaatctatcggctaacagcaatgcccaggttctgtccgggacggaattttcagcaatacctcatgtgaaatacctcgacctgactaacaatcggcttgattttgacaacgctagtgccttgacagagctgtctgatttagaagtcctcgacctgagctataattcccactacttccgaatcgcgggagtgacccaccatcttgagtttattcagaacttcactaatctgaaggtgttgaacctctcacacaataacatctacacactgaccgataaatataatctagagagcaagtctctggtcgaactcgttttctccggcaaccgcctggacattctttggaatgacgatgacaacagatacatcagtatattcaaaggcttgaagaacctgacgaggttagatctcagcctgaatcggcttaagcatatccccaacgaggcctttctgaatctaccagcatctctcaccgaactgcacattaacgacaatatgttgaaattctttaactggacactgttacagcaattcccccgcctcgagctgcttgatctgagagggaataagctcctcttcctgactgactccctatcagattttaccagtagcctgaggacacttctcctgtcgcataaccgtatctcccacttgccttctggattcctgagcgaggtgtcaagtttaaaacacctcgacctgtcctctaatcttctgaagactattaacaaaagcgctttggaaaccaagacaaccactaagctctccatgctggagctacatggtaatccatttgaatgcacgtgtgatatcggcgacttccggcgatggatggatgagcacctgaacgtaaaaataccgagacttgtggacgtcatttgcgcctcacccggggatcagaggggaaagagcatcgtgagtctcgaactgacaacctgtgtttctgacgtgactgctgtcattttgtttttctttaccttctttatcacaaccatggtgatgttagccgcactggcccatcacctcttctattgggacgtatggtttatatacaatgtttgcctggctaaagtgaagggctatcgctcccttagcacttcgcagacattctacgatgcgtatatctcatacgacacgaaagatgcatctgtcaccgactgggtgattaacgagctgcggtaccacttggaggaaagtagagataagaatgtcctactgtgtctcgaggaaagggactgggatcctggtctggccatcattgacaaccttatgcagtccatcaatcaaagcaagaaaactgtgttcgttttaacaaagaaatatgctaagtcttggaactttaaaaccgccttctacctggcactccagcgcttgatggatgagaacatggacgtgataatttttatcctgctcgaaccagtactgcagcatagccaatatcttcgactgcggcagcgtatctgcaagtcctcaattttgcagtggcccgataatcctaaagccgaggggctattctggcagacactgagaaacgtcgtgctcactgagaatgacagtaggtacaacaatatgtatgttgatagcatcaagcaatactga

SEQ ID NO: 9800 - RNA, 3126 nt, synthetic construct
  misc_feature 1..3126: note = derived and/or modified sequence opt4 fromTLR8__Homo_sapiens__AAF78036
  source 1..3126: mol_type = other RNA
atggagaacatgttcctgcagagcagcatgctgacctgcatcttcctgctgatcagcggcagctgcgagctgtgcgccgaggagaacttcagcagaagctacccctgcgacgagaagaagcagaacgacagcgtgatcgccgagtgcagcaacagaagactgcaggaggtgccccagaccgtgggcaagtacgtgaccgagctggacctgagcgacaacttcatcacccacatcaccaacgagagcttccagggcctgcagaacctgaccaagatcaacctgaaccacaaccccaacgtgcagcaccagaacggcaaccccggcatccagagcaacggcctgaacatcaccgacggcgccttcctgaacctgaagaacctgagagagctgctgctggaggacaaccagctgccccagatccccagcggcctgcccgagagcctgaccgagctgagcctgatccagaacaacatctacaacatcaccaaggagggcatcagcagactgatcaacctgaagaacctgtacctggcctggaactgctacttcaacaaggtgtgcgagaagaccaacatcgaggacggcgtgttcgagaccctgaccaacctggagctgctgagcctgagcttcaacagcctgagccacgtgccccccaagctgcccagcagcctgagaaagctgttcctgagcaacacccagatcaagtacatcagcgaggaggacttcaagggcctgatcaacctgaccctgctggacctgagcggcaactgccccagatgcttcaacgcccccttcccctgcgtgccctgcgacggcggcgccagcatcaacatcgacagattcgccttccagaacctgacccagctgagatacctgaacctgagcagcaccagcctgagaaagatcaacgccgcctggttcaagaacatgccccacctgaaggtgctggacctggagttcaactacctggtgggcgagatcgccagcggcgccttcctgaccatgctgcccagactggagatcctggacctgagcttcaactacatcaagggcagctacccccagcacatcaacatcagcagaaacttcagcaagctgctgagcctgagagccctgcacctgagaggctacgtgttccaggagctgagagaggacgacttccagcccctgatgcagctgcccaacctgagcaccatcaacctgggcatcaacttcatcaagcagatcgacttcaagctgttccagaacttcagcaacctggagatcatctacctgagcgagaacagaatcagccccctggtgaaggacaccagacagagctacgccaacagcagcagcttccagagacacatcagaaagagaagaagcaccgacttcgagttcgacccccacagcaacttctaccacttcaccagacccctgatcaagccccagtgcgccgcctacggcaaggccctggacctgagcctgaacagcatcttcttcatcggccccaaccagttcgagaacctgcccgacatcgcctgcctgaacctgagcgccaacagcaacgcccaggtgctgagcggcaccgagttcagcgccatcccccacgtgaagtacctggacctgaccaacaacagactggacttcgacaacgccagcgccctgaccgagctgagcgacctggaggtgctggacctgagctacaacagccactacttcagaatcgccggcgtgacccaccacctggagttcatccagaacttcaccaacctgaaggtgctgaacctgagccacaacaacatctacaccctgaccgacaagtacaacctggagagcaagagcctggtggagctggtgttcagcggcaacagactggacatcctgtggaacgacgacgacaacagatacatcagcatcttcaagggcctgaagaacctgaccagactggacctgagcctgaacagactgaagcacatccccaacgaggccttcctgaacctgcccgccagcctgaccgagctgcacatcaacgacaacatgctgaagttcttcaactggaccctgctgcagcagttccccagactggagctgctggacctgagaggcaacaagctgctgttcctgaccgacagcctgagcgacttcaccagcagcctgagaaccctgctgctgagccacaacagaatcagccacctgcccagcggcttcctgagcgaggtgagcagcctgaagcacctggacctgagcagcaacctgctgaagaccatcaacaagagcgccctggagaccaagaccaccaccaagctgagcatgctggagctgcacggcaaccccttcgagtgcacctgcgacatcggcgacttcagaagatggatggacgagcacctgaacgtgaagatccccagactggtggacgtgatctgcgccagccccggcgaccagagaggcaagagcatcgtgagcctggagctgaccacctgcgtgagcgacgtgaccgccgtgatcctgttcttcttcaccttcttcatcaccaccatggtgatgctggccgccctggcccaccacctgttctactgggacgtgtggttcatctacaacgtgtgcctggccaaggtgaagggctacagaagcctgagcaccagccagaccttctacgacgcctacatcagctacgacaccaaggacgccagcgtgaccgactgggtgatcaacgagctgagataccacctggaggagagcagagacaagaacgtgctgctgtgcctggaggagagagactgggaccccggcctggccatcatcgacaacctgatgcagagcatcaaccagagcaagaagaccgtgttcgtgctgaccaagaagtacgccaagagctggaacttcaagaccgccttctacctggccctgcagagactgatggacgagaacatggacgtgatcatcttcatcctgctggagcccgtgctgcagcacagccagtacctgagactgagacagagaatctgcaagagcagcatcctgcagtggcccgacaaccccaaggccgagggcctgttctggcagaccctgagaaacgtggtgctgaccgagaacgacagcagatacaacaacatgtacgtggacagcatcaagcagtactga

SEQ ID NO: 9801 - RNA, 3126 nt, synthetic construct
  misc_feature 1..3126: note = derived and/or modified sequence opt5 fromTLR8__Homo_sapiens__AAF78036
  source 1..3126: mol_type = other RNA
atggagaacatgttcctgcagagctccatgctgacctgcatctttctgcttatttctggcagctgtgaactgtgcgccgaggaaaatttctccagatcttacccctgtgacgagaagaaacaaaacgatagcgtgatcgctgaatgctccaatcggcgcctccaggaggtccctcagacagttgggaagtatgtgacggagctggacctttctgataactttattacccacatcacaaatgaatccttccagggactgcaaaacctcaccaaaattaatctgaaccataatccgaacgtgcagcaccagaatggcaaccccgggatccagtccaatggactgaacatcacagacggcgcctttctcaatctgaagaaccttagagagctgctcctggaagataaccaacttcctcagattcccagcgggctgcctgagtctctcaccgagctgtccctgatccagaataacatttacaatatcacaaaagaaggaattagccggctcatcaacctgaagaatctttatctggcgtggaactgttacttcaataaggtctgcgagaaaaccaacattgaagacggcgtgtttgagacgctcaccaatctggaacttctgtctctctccttcaacagcctgtctcatgttccccctaagctgccgtccagcctccgcaaactgtttctttccaatacacagatcaagtatatctctgaggaggatttcaaaggcctgattaacctcaccctgcttgacctgagcgggaattgtcccagatgctttaacgctcctttcccctgtgtgccttgcgatggaggcgcctccatcaatattgaccggtttgccttccaaaacctcacacagctgcgctacctgaacctcagctctacctccctgagaaagatcaatgctgcctggttcaagaacatgccccaccttaaagtcctggatctcgaatttaattatctggtgggggagattgctagcggagccttcctgacgatgcttccgcggctcgaaatcctggacctgtcttttaactacatcaagggcagctaccctcagcatattaatatctcccgcaacttctctaaactcctgagccttagagcgctgcacctccgggggtatgtttttcaagagctgcgcgaagatgacttccagcccctgatgcagcttcctaatctctccacaattaacctgggaatcaattttattaagcagatcgacttcaaactgtttcaaaacttcagcaatctcgagatcatttacctgtctgagaacagaatcagcccccttgtgaaggatacccggcagagctatgccaattcttccagctttcagcgccacattagaaaacggagatccacagacttcgaatttgatccccattctaacttctaccacttcacccgccctctgatcaagccgcagtgtgctgcctatggcaaggctctcgacctgagcctcaattccattttcttcatcggccccaaccaatttgagaaccttcctgatattgcctgcctcaatctgtctgcgaacagcaatgcccaggtcctgtccgggaccgaatttagcgctatcccccatgtgaaatacctcgacctgacaaacaatcggcttgattttgacaacgcctctgctctgacggagctctccgatctggaagtgctggaccttagctataattctcactacttcagaatcgccggagtcacccaccatctcgagtttattcagaacttcacaaatctgaaggttctgaacctctcccacaataacatctacaccctgacagataaatataatcttgagagcaagtctctggtggaactcgtgtttagcggcaaccgcctggacattctgtggaatgacgatgacaaccggtacatctccattttcaaagggcttaagaacctgaccagactcgatctgagcctcaatcgcctgaagcatatccctaacgaggcctttcttaatctgcccgcttctctcacggaactgcacatcaacgacaatatgctgaaattctttaactggacacttctgcagcaattcccgcggctcgagctgctcgatctgagaggaaataaacttctgttcctcaccgactccctgagcgattttacctcctctctgcgcacacttctgctcagccataaccggatttcccatctgccttctggcttcctcagcgaggtctcctctctgaagcaccttgacctgagctccaatctgctcaagaccatcaacaaaagcgcgctggaaacaaagacgaccacaaaactttctatgctggagctccacgggaatccctttgaatgcacctgtgatattggagacttcagacgctggatggatgagcacctgaacgtgaagatccctcggctcgttgacgtgatttgcgcctcccccggcgatcagagaggcaagagcatcgtctctctggaacttacaacctgtgtgtccgacgttacggctgtgatcctgtttttctttaccttctttattacaaccatggtcatgctggccgccctcgctcatcacctgttctattgggacgtgtggtttatctacaatgtctgccttgccaaagtgaaggggtatcggagcctgtctacatcccagaccttctacgatgcgtatattagctacgacacgaaagatgcttccgttacagactgggtgatcaacgagctccgctaccacctggaggaaagcagagataagaatgtcctcctgtgtcttgaggaacgggactgggatcctggactggccattatcgacaacctgatgcagtctatcaatcaaagcaagaaaaccgtgttcgttctcacaaagaaatatgccaagtcctggaactttaaaaccgctttctacctggcccttcagagactgatggatgagaacatggacgtgattatctttattctcctggaacccgtcctccagcattctcaatatctgcgccttcggcagagaatctgcaagagctccattctgcagtggccggataatcctaaagctgagggcctgttctggcagaccctccgcaacgtggtgctgacagagaatgactctagatacaacaatatgtatgttgatagcatcaagcaatactga

SEQ ID NO: 9802 - protein, 1032 aa, synthetic construct [sequence omitted]

SEQ ID NO: 9803 - RNA, 3099 nt, synthetic construct
  misc_feature 1..3099: note = TLR9__Homo_sapiens__ABW37074
  source 1..3099: mol_type = other RNA
atgggtttctgccgcagcgccctgcacccgctgtctctcctggtgcaggccatcatgctggccatgaccctggccctgggtaccttgcctgccttcctaccctgtgagctccagccccacggcctggtgaactgcaactggctgttcctgaagtctgtgccccacttctccacggcagcaccccgtggcaatgtcaccagcctttccttgtcctccaaccgcatccaccacctccatgattctgactttgcccacctgcccagcctgcggcatctcaacctcaagtggaactgcccgccggttggcctcagccccatgcacttcccctgccacatgaccatcgagcccagcaccttcttggctgtgcccaccctggaagagctaaacctgagctacaacaacatcatgactgtgcctgcgctgcccaaatccctcatatccctgtccctcagccataccaacatcctgatgctagactctgccagcctcgccggcctgcatgccctgcgcttcctattcatggacggcaactgttattacaagaacccctgcaggcaggcactggaggtggccccgggtgccctccttggcctgggcaacctcacccacctgtcactcaagtacaacaacctcactgtggtgccccgcaacctgccttccagcctggagtatctgctgttgtcctacaaccgcatcgtcaaactggcgcctgaggacctggccaatctgaccgccctgcgtgtgctcgatgtgggcggaaattgccgccgctgcgaccacgctcccaacccctgcatggagtgccctcgtcacttcccccagctacatcccgataccttcagccacctgagccgtcttgaaggcctggtgttgaaggacagttctctctcctggctgaatgccagttggttccgtgggctgggaaacctccgagtgctggacctgagtgagaacttcctctacaaatgcatcactaaaaccaaggccttccagggcctaacacagctgcgcaagcttaacctgtccttcaattaccaaaagagggtgtcctttgcccacctgtctctggccccttccttcgggagcctggtcgccctgaaggagctggacatgcacggcatcttcttccgctcactcgatgagaccacgctccggccactggcccgcctgcccatgctccagactctgcgtctgcagatgaacttcatcaaccaggcccagctcggcatcttcagggccttccctggcctgcgctacgtggacctgtcggacaaccgcatcagcggagcttcggagctgacagccaccatgggggaggcagatggaggggagaaggtctggctgcagcctggggaccttgctccggccccagtggacactcccagctctgaagacttcaggcccaactgcagcaccctcaacttcaccttggatctgtcacggaacaacctggtgaccgtgcagccggagatgtttgcccagctctcgcacctgcagtgcctgcgcctgagccacaactgcatctcgcaggcagtcaatggctcccagttcctgccgctgaccggtctgcaggtgctagacctgtcccacaataagctggacctctaccacgagcactcattcacggagctaccgcgactggaggccctggacctcagctacaacagccagccctttggcatgcagggcgtgggccacaacttcagcttcgtggctcacctgcgcaccctgcgccacctcagcctggcccacaacaacatccacagccaagtgtcccagcagctctgcagtacgtcgctgcgggccctggacttcagcggcaatgcactgggccatatgtgggccgagggagacctctatctgcacttcttccaaggcctgagcggtttgatctggctggacttgtcccagaaccgcctgcacaccctcctgccccaaaccctgcgcaacctccccaagagcctacaggtgctgcgtctccgtgacaattacctggccttctttaagtggtggagcctccacttcctgcccaaactggaagtcctcgacctggcaggaaaccagctgaaggccctgaccaatggcagcctgcctgctggcacccggctccggaggctggatgtcagctgcaacagcatcagcttcgtggcccccggcttcttttccaaggccaaggagctgcgagagctcaaccttagcgccaacgccctcaagacagtggaccactcctggtttgggcccctggcgagtgccctgcaaatactagatgtaagcgccaaccctctgcactgcgcctgtggggcggcctttatggacttcctgctggaggtgcaggctgccgtgcccggtctgcccagccgggtgaagtgtggcagtccgggccagctccagggcctcagcatctttgcacaggacctgcgcctctgcctggatgaggccctctcctgggactgtttcgccctctcgctgctggctgtggctctgggcctgggtgtgcccatgctgcatcacctctgtggctgggacctctggtactgcttccacctgtgcctggcctggcttccctggcgggggcggcaaagtgggcgagatgaggatgccctgccctacgatgccttcgtggtcttcgacaaaacgcagagcgcagtggcagactgggtgtacaacgagcttcgggggcagctggaggagtgccgtgggcgctgggcactccgcctgtgcctggaggaacgcgactggctgcctggcaaaaccctctttgagaacctgtgggcctcggtctatggcagccgcaagacgctgtttgtgctggcccacacggaccgggtcagtggtctcttgcgcgccagcttcctgctggcccagcagcgcctgctggaggaccgcaaggacgtcgtggtgctggtgatcctgagccctgacggccgccgctcccgctacgtgcggctgcgccagcgcctctgccgccagagtgtcctcctctggccccaccagcccagtggtcagcgcagcttctgggcccagctgggcatggccctgaccagggacaaccaccacttctataaccggaacttctgccagggacccacggccgaatag

SEQ ID NO: 9804 - RNA, 3099 nt, synthetic construct
  misc_feature 1..3099: note = derived and/or modified sequence opt1 fromTLR9__Homo_sapiens__ABW37074
  source 1..3099: mol_type = other RNA
atgggcttctgccgcagcgccctgcaccccctctccctgctggtgcaggccatcatgctcgcgatgaccctggccctggggaccctcccggccttcctgccctgcgagctgcagccccacggcctcgtcaactgcaactggctgttcctcaagagcgtgccccacttctccacggccgccccgcgggggaacgtgaccagcctgtccctgagctccaaccgcatccaccacctccacgacagcgacttcgcgcacctcccctccctgcggcacctgaacctgaagtggaactgcccgcccgtcggcctgagccccatgcacttcccctgccacatgaccatcgagccctccaccttcctggccgtgcccacgctcgaggagctgaacctgagctacaacaacatcatgaccgtgccggccctccccaagtccctgatcagcctgtccctcagccacaccaacatcctgatgctggactccgccagcctcgcggggctgcacgccctgcgcttcctcttcatggacggcaactgctactacaagaacccctgccggcaggccctggaggtcgcccccggcgccctgctcgggctgggcaacctgacccacctctccctgaagtacaacaacctgacggtggtgccgcgcaacctccccagcagcctggagtacctgctcctgtcctacaaccggatcgtcaagctggcgcccgaggacctcgccaacctgaccgccctgcgcgtgctggacgtcgggggcaactgccggcgctgcgaccacgcccccaacccgtgcatggagtgcccccggcacttcccccagctccaccccgacaccttcagccacctgtcccgcctggaggggctcgtgctgaaggacagctccctgagctggctcaacgcctcctggttccggggcctgggcaacctgcgcgtgctcgacctgagcgagaacttcctgtacaagtgcatcaccaagacgaaggcgttccaggggctcacccagctgcggaagctgaacctctccttcaactaccagaagcgcgtgagcttcgcccacctgtccctggccccgagcttcggctccctcgtcgccctgaaggagctggacatgcacgggatcttcttccggagcctcgacgagaccaccctgcgccccctggcccggctccccatgctgcagacgctgcgcctccagatgaacttcatcaaccaggcgcagctgggcatcttccgggccttccccggcctgcgctacgtggacctctccgacaaccgcatcagcggggcctccgagctgaccgccaccatgggcgaggccgacgggggcgagaaggtgtggctgcagccgggggacctcgcgcccgcccccgtcgacaccccgagctccgaggacttccggcccaactgcagcacgctgaacttcaccctggacctcagccgcaacaacctggtgaccgtgcagcccgagatgttcgcccagctgtcccacctccagtgcctgcggctgagccacaactgcatctcccaggccgtcaacggcagccagttcctccccctgaccggcctccaggtgctggacctgtcccacaacaagctggacctctaccacgagcacagcttcacggagctgccgcgcctggaggcgctcgacctgtcctacaacagccagcccttcgggatgcagggcgtggggcacaacttctccttcgtcgcccacctccggaccctgcgccacctgagcctggcccacaacaacatccactcccaggtgagccagcagctctgctccaccagcctgcgggccctggacttctccggcaacgccctcgggcacatgtgggcggagggcgacctgtacctgcacttcttccagggcctcagcgggctgatctggctggacctctcccagaaccgcctgcacaccctgctcccccagacgctgcggaacctgcccaagagcctccaggtcctgcgcctgcgggacaactacctcgccttcttcaagtggtggagcctgcacttcctgccgaagctcgaggtgctggacctggccggcaaccagctcaaggccctgaccaacgggtccctgcccgccggcacccgcctccggcgcctggacgtgagctgcaactccatcagcttcgtcgcgcccgggttcttctccaaggccaaggagctgcgggagctcaacctgagcgccaacgccctgaagaccgtggaccactcctggttcggccccctcgccagcgcgctgcagatcctggacgtgtccgccaacccgctccactgcgcctgcggcgccgcgttcatggacttcctgctggaggtccaggccgccgtgcccgggctgcccagccgcgtgaagtgcggctcccccgggcagctccagggcctgagcatcttcgcccaggacctgcggctctgcctggacgaggccctgtcctgggactgcttcgcgctcagcctgctggccgtcgccctcggcctgggggtgccgatgctgcaccacctctgcggctgggacctgtggtactgcttccacctgtgcctcgcctggctgccctggcgcgggcggcagtccggccgcgacgaggacgccctgccctacgacgcgttcgtggtcttcgacaagacgcagagcgccgtggccgactgggtgtacaacgagctccgcgggcagctggaggagtgccggggccgctgggccctgcggctctgcctggaggagcgcgactggctgcccggcaagaccctcttcgagaacctgtgggcctccgtctacgggagccggaagaccctgttcgtgctcgcgcacaccgaccgcgtgtccggcctgctgcgggccagcttcctcctggcccagcagcgcctgctcgaggaccggaaggacgtcgtggtgctggtcatcctgagcccggacgggcgccggtcccgctacgtgcggctccgccagcggctgtgccgccagagcgtgctgctctggccccaccagccctccggccagcggagcttctgggcccagctggggatggcgctgacgcgcgacaaccaccacttctacaaccggaacttctgccagggccccaccgccgagtga

SEQ ID NO: 9805 - RNA, 3099 nt, synthetic construct
  misc_feature 1..3099: note = derived and/or modified sequence opt2 fromTLR9__Homo_sapiens__ABW37074
  source 1..3099: mol_type = other RNA
atgggcttctgccgctccgccctccaccccctctccctcctcgtccaggccatcatgctcgccatgaccctcgccctcggcaccctccccgccttcctcccctgcgagctccagccccacggcctcgtcaactgcaactggctcttcctcaagtccgtcccccacttctccaccgccgccccccgcggcaacgtcacctccctctccctctcctccaaccgcatccaccacctccacgactccgacttcgcccacctcccctccctccgccacctcaacctcaagtggaactgcccccccgtcggcctctcccccatgcacttcccctgccacatgaccatcgagccctccaccttcctcgccgtccccaccctcgaggagctcaacctctcctacaacaacatcatgaccgtccccgccctccccaagtccctcatctccctctccctctcccacaccaacatcctcatgctcgactccgcctccctcgccggcctccacgccctccgcttcctcttcatggacggcaactgctactacaagaacccctgccgccaggccctcgaggtcgcccccggcgccctcctcggcctcggcaacctcacccacctctccctcaagtacaacaacctcaccgtcgtcccccgcaacctcccctcctccctcgagtacctcctcctctcctacaaccgcatcgtcaagctcgcccccgaggacctcgccaacctcaccgccctccgcgtcctcgacgtcggcggcaactgccgccgctgcgaccacgcccccaacccctgcatggagtgcccccgccacttcccccagctccaccccgacaccttctcccacctctcccgcctcgagggcctcgtcctcaaggactcctccctctcctggctcaacgcctcctggttccgcggcctcggcaacctccgcgtcctcgacctctccgagaacttcctctacaagtgcatcaccaagaccaaggccttccagggcctcacccagctccgcaagctcaacctctccttcaactaccagaagcgcgtctccttcgcccacctctccctcgccccctccttcggctccctcgtcgccctcaaggagctcgacatgcacggcatcttcttccgctccctcgacgagaccaccctccgccccctcgcccgcctccccatgctccagaccctccgcctccagatgaacttcatcaaccaggcccagctcggcatcttccgcgccttccccggcctccgctacgtcgacctctccgacaaccgcatctccggcgcctccgagctcaccgccaccatgggcgaggccgacggcggcgagaaggtctggctccagcccggcgacctcgcccccgcccccgtcgacaccccctcctccgaggacttccgccccaactgctccaccctcaacttcaccctcgacctctcccgcaacaacctcgtcaccgtccagcccgagatgttcgcccagctctcccacctccagtgcctccgcctctcccacaactgcatctcccaggccgtcaacggctcccagttcctccccctcaccggcctccaggtcctcgacctctcccacaacaagctcgacctctaccacgagcactccttcaccgagctcccccgcctcgaggccctcgacctctcctacaactcccagcccttcggcatgcagggcgtcggccacaacttctccttcgtcgcccacctccgcaccctccgccacctctccctcgcccacaacaacatccactcccaggtctcccagcagctctgctccacctccctccgcgccctcgacttctccggcaacgccctcggccacatgtgggccgagggcgacctctacctccacttcttccagggcctctccggcctcatctggctcgacctctcccagaaccgcctccacaccctcctcccccagaccctccgcaacctccccaagtccctccaggtcctccgcctccgcgacaactacctcgccttcttcaagtggtggtccctccacttcctccccaagctcgaggtcctcgacctcgccggcaaccagctcaaggccctcaccaacggctccctccccgccggcacccgcctccgccgcctcgacgtctcctgcaactccatctccttcgtcgcccccggcttcttctccaaggccaaggagctccgcgagctcaacctctccgccaacgccctcaagaccgtcgaccactcctggttcggccccctcgcctccgccctccagatcctcgacgtctccgccaaccccctccactgcgcctgcggcgccgccttcatggacttcctcctcgaggtccaggccgccgtccccggcctcccctcccgcgtcaagtgcggctcccccggccagctccagggcctctccatcttcgcccaggacctccgcctctgcctcgacgaggccctctcctgggactgcttcgccctctccctcctcgccgtcgccctcggcctcggcgtccccatgctccaccacctctgcggctgggacctctggtactgcttccacctctgcctcgcctggctcccctggcgcggccgccagtccggccgcgacgaggacgccctcccctacgacgccttcgtcgtcttcgacaagacccagtccgccgtcgccgactgggtctacaacgagctccgcggccagctcgaggagtgccgcggccgctgggccctccgcctctgcctcgaggagcgcgactggctccccggcaagaccctcttcgagaacctctgggcctccgtctacggctcccgcaagaccctcttcgtcctcgcccacaccgaccgcgtctccggcctcctccgcgcctccttcctcctcgcccagcagcgcctcctcgaggaccgcaaggacgtcgtcgtcctcgtcatcctctcccccgacggccgccgctcccgctacgtccgcctccgccagcgcctctgccgccagtccgtcctcctctggccccaccagccctccggccagcgctccttctgggcccagctcggcatggccctcacccgcgacaaccaccacttctacaaccgcaacttctgccagggccccaccgccgagtga

SEQ ID NO: 9806 - RNA, 3099 nt, synthetic construct
  misc_feature 1..3099: note = derived and/or modified sequence opt3 fromTLR9__Homo_sapiens__ABW37074
  source 1..3099: mol_type = other RNA
atgggcttctgcagaagcgccctgcaccccctctcccttctggtgcaggctatcatgttggcaatgaccttagccctggggacactacctgcgtttctcccatgtgagctgcaaccgcatggacttgtcaactgcaattggctgttcttgaagtctgttccccacttttcaactgctgcccctaggggtaacgtgacgagtctcagcctgtcctctaatcggattcatcaccttcatgactcggatttcgcacacctcccatcattacgccacctgaaccttaaatggaattgtccccctgtaggcttgagcccaatgcattttccctgccacatgaccatagaacctagtacattcctggccgtgccaactctagaggaactcaacctgtcctacaataacatcatgaccgtcccggctctgcccaagtctctgattagcttgtccctctcacatacaaatatcctgatgttagacagtgcaagcctggccgggctccacgctctgcgatttctgttcatggatggaaactgttattacaaaaatccttgccgtcaggccttggaggtggcgccaggcgcactactgggtctcgggaacctgacccacctttctctgaagtataataacttgactgttgtgcccagaaatctcccttcctcactggaatacttactgctaagctataacaggattgtcaaactcgccccagaggacctggctaaccttacagccttgcgggtgctggatgtaggaggcaattgtcgcagatgcgaccatgcacccaacccgtgtatggagtgccctaggcactttccccagctccatccagataccttcagtcacctgtctcggcttgaaggcctggttttgaaggactccagcctctcgtggctgaatgcttcttggtttcgcgggttaggaaacctgcgagtgctagatctctccgagaatttcctgtacaagtgtatcacgaaaactaaggcctttcagggtcttacccaattgagaaaactgaacctctcattcaattatcagaagagggtcagtttcgcgcatctgagcttagccccttcctttggctctctggtggcacttaaagaattggacatgcacgggatattctttcggagcctcgatgagacaactctgcgtcccctagctcgcctgccaatgctccagaccctgagacttcagatgaacttcatcaatcaagcccagttgggaatttttagggctttccccggcctgcggtacgtggacttatcagataaccgaatcagtggtgcctccgagctcacagcaaccatgggggaagccgacggaggcgagaaggtctggctgcagcctggcgaccttgctccagcgccggttgatacgcccagctctgaagactttcgccctaattgctcaactctgaacttcacattggatctcagtagaaataacctggtgaccgtacagccagagatgtttgcacaactaagccaccttcagtgcctcaggctgtcccataattgtatttctcaggccgtgaacgggtcgcaattccttcccttgactggactgcaggtcttagacctcagccacaacaagctggatctttaccatgaacactcctttacagagctgcctcggctagaggctctcgacctgtcatataatagtcagccattcggtatgcagggcgtggggcacaacttttctttcgttgcccatttgcgcaccctgagacacttaagcctcgcacataataacatccactcccaagtgtcacagcagctgtgcagcacgtctcttagggccctggatttctccggaaatgctttgggccatatgtgggccgaaggtgacctctacctgcactttttccaggggctaagtggcctgatatggcttgatctcagccaaaaccgtctgcacaccttgctgccccagacattacggaatctcccgaaatctctgcaggtccttcgactgagagacaactatttggcatttttcaagtggtggtccctccattttctgcctaaactagaggtgctggatcttgcgggaaatcagctcaaggctctgactaacggctcattgccagccgggaccaggttacgccggctggacgtaagttgtaatagcatttcgttcgttgcacccggatttttctccaaagccaaggaactcagagagctgaacctttctgctaatgccctgaaaacagtggaccacagctggtttggtcctttggcatcagctctacaaatcctggatgtcagtgccaaccccctccattgcgcgtgtggcgccgctttcatggactttctgcttgaagtgcaggcagccgtcccagggttaccttccagggtgaagtgcggatctcccggccagctgcagggtctcagcattttcgctcaagatttgcgcctgtgtctcgacgaggccctgtcctgggattgctttgcactttcactgttggcggttgccctagggctgggcgtgccaatgctccaccatttatgtggatgggacctgtggtactgcttccacctttgtctggcttggctcccgtggcgaggccggcagagcgggcgtgatgaggacgccttgccttatgatgcattcgtagtctttgacaagactcagagtgctgtggccgattgggtttacaatgaactgagaggacaactcgaggaatgcaggggtcgctgggcactgcggctttgcctagaggaaagagactggctgcccggcaaaaccttgttcgagaacttatgggcctctgtgtatgggtccaggaagacactgtttgtcctcgctcacaccgatcgagtgagcggactgcttcgcgcgtcgttcctgctcgcccagcagcggttgctggaggacagaaaagacgtagtggttctagtcatcctgtcaccagatggcaggcgttctcgctacgtgcggctcagacagaggctttgtcgacaaagtgtgctgttatggccccatcagccttccggtcagcggagcttttgggcacagttggggatggctctgactcgcgacaaccaccatttctacaatagaaacttttgccaaggcccaacggccgaatga

SEQ ID NO: 9807 - RNA, 3099 nt, synthetic construct
  misc_feature 1..3099: note = derived and/or modified sequence opt4 fromTLR9__Homo_sapiens__ABW37074
  source 1..3099: mol_type = other RNA
atgggcttctgcagaagcgccctgcaccccctgagcctgctggtgcaggccatcatgctggccatgaccctggccctgggcaccctgcccgccttcctgccctgcgagctgcagccccacggcctggtgaactgcaactggctgttcctgaagagcgtgccccacttcagcaccgccgcccccagaggcaacgtgaccagcctgagcctgagcagcaacagaatccaccacctgcacgacagcgacttcgcccacctgcccagcctgagacacctgaacctgaagtggaactgcccccccgtgggcctgagccccatgcacttcccctgccacatgaccatcgagcccagcaccttcctggccgtgcccaccctggaggagctgaacctgagctacaacaacatcatgaccgtgcccgccctgcccaagagcctgatcagcctgagcctgagccacaccaacatcctgatgctggacagcgccagcctggccggcctgcacgccctgagattcctgttcatggacggcaactgctactacaagaacccctgcagacaggccctggaggtggcccccggcgccctgctgggcctgggcaacctgacccacctgagcctgaagtacaacaacctgaccgtggtgcccagaaacctgcccagcagcctggagtacctgctgctgagctacaacagaatcgtgaagctggcccccgaggacctggccaacctgaccgccctgagagtgctggacgtgggcggcaactgcagaagatgcgaccacgcccccaacccctgcatggagtgccccagacacttcccccagctgcaccccgacaccttcagccacctgagcagactggagggcctggtgctgaaggacagcagcctgagctggctgaacgccagctggttcagaggcctgggcaacctgagagtgctggacctgagcgagaacttcctgtacaagtgcatcaccaagaccaaggccttccagggcctgacccagctgagaaagctgaacctgagcttcaactaccagaagagagtgagcttcgcccacctgagcctggcccccagcttcggcagcctggtggccctgaaggagctggacatgcacggcatcttcttcagaagcctggacgagaccaccctgagacccctggccagactgcccatgctgcagaccctgagactgcagatgaacttcatcaaccaggcccagctgggcatcttcagagccttccccggcctgagatacgtggacctgagcgacaacagaatcagcggcgccagcgagctgaccgccaccatgggcgaggccgacggcggcgagaaggtgtggctgcagcccggcgacctggcccccgcccccgtggacacccccagcagcgaggacttcagacccaactgcagcaccctgaacttcaccctggacctgagcagaaacaacctggtgaccgtgcagcccgagatgttcgcccagctgagccacctgcagtgcctgagactgagccacaactgcatcagccaggccgtgaacggcagccagttcctgcccctgaccggcctgcaggtgctggacctgagccacaacaagctggacctgtaccacgagcacagcttcaccgagctgcccagactggaggccctggacctgagctacaacagccagcccttcggcatgcagggcgtgggccacaacttcagcttcgtggcccacctgagaaccctgagacacctgagcctggcccacaacaacatccacagccaggtgagccagcagctgtgcagcaccagcctgagagccctggacttcagcggcaacgccctgggccacatgtgggccgagggcgacctgtacctgcacttcttccagggcctgagcggcctgatctggctggacctgagccagaacagactgcacaccctgctgccccagaccctgagaaacctgcccaagagcctgcaggtgctgagactgagagacaactacctggccttcttcaagtggtggagcctgcacttcctgcccaagctggaggtgctggacctggccggcaaccagctgaaggccctgaccaacggcagcctgcccgccggcaccagactgagaagactggacgtgagctgcaacagcatcagcttcgtggcccccggcttcttcagcaaggccaaggagctgagagagctgaacctgagcgccaacgccctgaagaccgtggaccacagctggttcggccccctggccagcgccctgcagatcctggacgtgagcgccaaccccctgcactgcgcctgcggcgccgccttcatggacttcctgctggaggtgcaggccgccgtgcccggcctgcccagcagagtgaagtgcggcagccccggccagctgcagggcctgagcatcttcgcccaggacctgagactgtgcctggacgaggccctgagctgggactgcttcgccctgagcctgctggccgtggccctgggcctgggcgtgcccatgctgcaccacctgtgcggctgggacctgtggtactgcttccacctgtgcctggcctggctgccctggagaggcagacagagcggcagagacgaggacgccctgccctacgacgccttcgtggtgttcgacaagacccagagcgccgtggccgactgggtgtacaacgagctgagaggccagctggaggagtgcagaggcagatgggccctgagactgtgcctggaggagagagactggctgcccggcaagaccctgttcgagaacctgtgggccagcgtgtacggcagcagaaagaccctgttcgtgctggcccacaccgacagagtgagcggcctgctgagagccagcttcctgctggcccagcagagactgctggaggacagaaaggacgtggtggtgctggtgatcctgagccccgacggcagaagaagcagatacgtgagactgagacagagactgtgcagacagagcgtgctgctgtggccccaccagcccagcggccagagaagcttctgggcccagctgggcatggccctgaccagagacaaccaccacttctacaacagaaacttctgccagggccccaccgccgagtga

SEQ ID NO: 9808 - RNA, 3099 nt, synthetic construct
  misc_feature 1..3099: note = derived and/or modified sequence opt5 fromTLR9__Homo_sapiens__ABW37074
  source 1..3099: mol_type = other RNA
atgggcttctgcagaagcgccctgcaccccctctccctgcttgtgcaggctatcatgctggccatgaccctcgcgctggggacacttcctgcttttctgccgtgtgagctccaaccccatggactggtcaactgcaattggctgttcctcaagtctgttcctcactttagcacggccgctccccggggcaacgtgacctccctgtctcttagctccaatcgcattcatcatctgcacgactctgatttcgctcacctccctagcctgagacaccttaacctgaaatggaattgtccccctgtggggctctccccgatgcattttccctgccacatgacaatcgaacctagcaccttcctggccgtccccacactggaggaactcaacctgtcttacaataacattatgaccgtgcctgctctgcccaagtccctgatcagcctctctctgtcccatacaaatattcttatgctggacagcgcctctctcgcgggactgcacgccctgcggtttctcttcatggatggcaactgttattacaaaaatccgtgccgccaggctctggaggttgcccctggggcccttctgggactcggcaacctgacccacctttccctgaagtataataacctcacggtggtccccagaaatctgcctagctccctggaatacctcctgctttcttataaccggatcgtgaaactggcccccgaggacctcgcgaacctgaccgccctgcgcgttcttgatgtgggcgggaattgtagacggtgcgaccatgctcccaacccttgtatggagtgcccgcgccactttccccagctccatcctgatacattcagccacctgtccagactggaaggactcgtcctgaaggacagctctctttcctggctgaatgccagctggtttcggggcctcgggaacctgcgcgtgctggatctttctgagaatttcctctacaagtgtatcaccaaaacaaaggcttttcagggactgacccaactgagaaaactcaacctgagcttcaattatcagaagcgggtgtccttcgcccatctttctctggcccccagctttggctccctcgtcgctctgaaagaactggacatgcacgggattttctttcgcagccttgatgagacgacactcagacctctggcgcggctgcccatgctccagaccctgagacttcagatgaacttcatcaatcaagcccagctgggaatttttcgcgctttcccgggcctccggtacgttgacctgtctgataacagaatctccggcgccagcgagctgacagccaccatgggggaagctgacggaggcgagaaggtgtggcttcagcctggggacctcgcccccgcgcctgtggataccccctcttccgaagactttcgccctaattgcagcacactgaacttcacgctggatctctcccggaataacctggtcaccgtgcagcccgagatgtttgctcaactttctcatctgcagtgcctcagactgagccacaattgtatttcccaggccgttaacggatctcaattcctgccgcttacaggccttcaggtgctcgacctgagccacaacaagctcgatctgtaccatgaacactcctttaccgagcttcctcgcctggaggccctcgacctgagctataattctcagcccttcgggatgcagggagtcggccacaacttttccttcgtggctcatctgcggacacttagacacctgagcctcgcccataataacatccactctcaagtttcccagcagctgtgcagcacctctctccgcgctctggatttcagcggcaatgcccttgggcatatgtgggcggaaggagacctgtacctccactttttccagggcctgtccgggctgatttggcttgatctgagccaaaaccggctccacacgctgctcccccagacactgagaaatcttcctaaatctctccaggtgctgcgcctgcgggacaactatctggcctttttcaagtggtggtcccttcattttctgccgaaactcgaggtcctggatctcgctggaaatcagctgaaggcccttaccaacggcagcctgcccgctgggaccagactgcggcgcctcgacgtgtcctgtaattctatcagcttcgtcgcccctggctttttctccaaagcgaaggaactgagagagcttaacctgtctgccaatgctctcaaaacagtggaccacagctggtttggacccctggcctccgctctccaaatcctggatgtttctgccaaccctcttcattgcgcctgtggcgctgcgttcatggactttctgctggaagtgcaggccgctgtccccgggctccctagccgggtgaagtgcggatcccccggccagctgcaggggcttagcattttcgcccaagatctgagactctgtctggacgaggccctctcttgggattgctttgctctgtcccttctggccgttgcgctgggactcggcgtgccgatgctgcaccatctttgtgggtgggacctgtggtactgcttccacctctgtctggcttggctgccttggcgcggccggcagagcggaagagatgaggacgccctcccctatgatgccttcgtcgtgtttgacaagacccagtctgctgtggccgattgggtttacaatgaacttcgcggccaactggaggaatgcagagggcggtgggcgctgcgcctctgcctggaggaaagagactggcttcctggaaaaacactgttcgagaacctctgggcttccgtctatggcagccggaagacgctgtttgtgctggcccacaccgatcgcgtgtctgggctccttagagcctccttcctgctggctcagcagcggctcctggaggaccgcaaagacgtcgtggttcttgtgatcctgagccccgatggaagacggtcccgctacgtcagactccggcagagactgtgtcgccaaagcgtgctgctctggccgcatcagccttctggccagcggagcttttgggcccagcttgggatggctctgacaagagacaaccaccatttctacaatcgcaacttttgccaaggccccaccgccgaatga

SEQ ID NO: 9809 - protein, 1032 aa, synthetic construct [sequence omitted]

SEQ ID NO: 9810 - RNA, 3099 nt, synthetic construct
  misc_feature 1..3099: note = TLR9__Homo_sapiens__AAZ95518
  source 1..3099: mol_type = other RNA
atgggtttctgccgcagcgccctgcacccgctgtctctcctggtgcaggccatcatgctggccatgaccctggccctgggtaccttgcctgccttcctaccctgtgagctccagccccacggcctggtgaactgcaactggctgttcctgaagtctgtgccccacttctccatggcagcaccccgtggcaatgtcaccagcctttccttgtcctccaaccgcatccaccacctccatgattctgactttgcccacctgcccagcctgcggcatctcaacctcaagtggaactgcccgccggttggcctcagccccatgcacttcccctgccacatgaccatcgagcccagcaccttcttggctgtgcccaccctggaagagctaaacctgagctacaacaacatcatgactgtgcctgcgctgcccaaatccctcatatccctgtccctcagccataccaacatcctgatgctagactctgccagcctcgccggcctgcatgccctgcgcttcctattcatggacggcaactgttattacaagaacccctgcaggcaggcactggaggtggccccgggtgccctccttggcctgggcaacctcacccacctgtcactcaagtacaacaacctcactgtggtgccccgcaacctgccttccagcctggagtatctgctgttgtcctacaaccgcatcgtcaaactggcgcctgaggacctggccaatctgaccgccctgcgtgtgctcgatgtgggcggaaattgccgccgctgcgaccacgctcccaacccctgcatggagtgccctcgtcacttcccccagctacatcccgataccttcagccacctgagccgtcttgaaggcctggtgttgaaggacagttctctctcctggctgaatgccagttggttccgtgggctgggaaacctccgagtgctggacctgagtgagaacttcctctacaaatgcatcactaaaaccaaggccttccagggcctaacacagctgcgcaagcttaacctgtccttcaattaccaaaagagggtgtcctttgcccacctgtctctggccccttccttcgggagcctggtcgccctgaaggagctggacatgcacggcatcttcttccgctcactcgatgagaccacactccggccactggcccgcctgcccatgctccagactctgcgtctgcagatgaacttcatcaaccaggcccagctcggcatcttcagggccttccctggcctgcgctacgtggacctgtcggacaaccgcatcagcggagcttcggagctgacagccaccatgggggaggcagatggaggggagaaggtctggctgcagcctggggaccttgctccggccccagtggacactcccagctctgaagacttcaggcccaactgcagcaccctcaacttcaccttggatctgtcacggaacaacctggtgaccgtgcagccggagatgtttgcccagctctcgcacctgcagtgcctgcgcctgagccacaactgcatctcacaggcagtcaatggctcccagttcctgccgctgaccggtctgcaggtgctagacctgtcccacaataagctggacctctaccacgagcactcattcacggagctaccgcgactggaggccctggacctcagctacaacagccagccctttggcatgcagggcgtgggccacaacttcagcttcgtggctcacctgcgcaccctgcgccacctcagcctggcccacaacaacatccacagccaagtgtcccagcagctctgcagtacgtcgctgcgggccctggacttcagcggcaatgcactgggccatatgtgggccgagggagacctctatctgcacttcttccaaggcctgagcggtttgatctggctggacttgtcccagaaccgcctgcacaccctcctgccccaaaccctgcgcaacctccccaagagcctacaggtgctgcgtctccgtgacaattacctggccttctttaagtggtggagcctccacttcctgcccaaactggaagtcctcgacctggcaggaaaccagctgaaggccctgaccaatggcagcctgcctgctggcacccggctccggaggctggatgtcagctgcaacagcatcagcttcgtggcccccggcttcttttccaaggccaaggagctgcgagagctcaaccttagcgccaacgccctcaagacagtggaccactcctggtttgggcccctggcgagtgccctgcaaatactagatgtaagcgccaaccctctgcactgcgcctgtggggcggcctttatggacttcctgctggaggtgcaggctgccgtgcccggtctgcccagccgggtgaagtgtggcagtccgggccagctccagggcctcagcatctttgcacaggacctgcgcctctgcctggatgaggccctctcctgggactgtttcgccctctcgctgctggctgtggctctgggcctgggtgtgcccatgctgcatcacctctgtggctgggacctctggtactgcttccacctgtgcctggcctggcttccctggcgggggcggcaaagtgggcgagatgaggatgccctgccctacgatgccttcgtggtcttcgacaaaacgcagagcgcagtggcagactgggtgtacaacgagcttcgggggcagctggaggagtgccgtgggcgctgggcactccacctgtgcctggaggaacgcgactggctgcctggcaaaaccctctttgagaacctgtgggcctcggtctatggcagccgcaagacgctgtttgtgctggcccacacggaccgggtcagtggtctcttgcgcgccagcttcctgctggcccagcagcgcctgctggaggaccgcaaggacgtcgtggtgctggtgatcctgagccctgacggccgccgctcccgctacgtgcggctgcgccagcgcctctgccgccagagtgtcctcctctggccccaccagcccagtggtcagcgcagcttctgggcccagctgggcatggccctgaccagggacaaccaccacttctataaccggaacttctgccagggacccacggccgaatag

SEQ ID NO: 9811 - RNA, 3099 nt, synthetic construct
  misc_feature 1..3099: note = derived and/or modified sequence opt1 fromTLR9__Homo_sapiens__AAZ95518
  source 1..3099: mol_type = other RNA
atgggcttctgccgcagcgccctgcaccccctctccctgctggtgcaggccatcatgctcgcgatgaccctggccctggggaccctcccggccttcctgccctgcgagctgcagccccacggcctcgtcaactgcaactggctgttcctgaagtccgtgccccacttcagcatggccgccccgcgggggaacgtgacgagcctctccctgagctccaaccgcatccaccacctccacgacagcgacttcgcgcacctcccctccctgcggcacctgaacctcaagtggaactgcccgcccgtcggcctgagccccatgcacttcccctgccacatgaccatcgagccctccaccttcctggccgtgcccaccctcgaggagctgaacctgagctacaacaacatcatgacggtgccggccctccccaagtccctgatcagcctgtccctcagccacaccaacatcctgatgctggactccgccagcctcgcggggctgcacgccctgcgcttcctcttcatggacggcaactgctactacaagaacccctgccggcaggccctggaggtcgcccccggcgccctgctcgggctgggcaacctgacccacctctccctgaagtacaacaacctgaccgtggtgccgcgcaacctccccagcagcctggagtacctgctcctgtcctacaaccggatcgtcaagctggcgcccgaggacctcgccaacctgacggccctgcgcgtgctggacgtcgggggcaactgccggcgctgcgaccacgcccccaacccgtgcatggagtgcccccggcacttcccccagctccaccccgacaccttcagccacctgtcccgcctggaggggctcgtgctgaaggacagctccctgagctggctcaacgcctcctggttccggggcctgggcaacctgcgcgtgctcgacctgagcgagaacttcctgtacaagtgcatcaccaagaccaaggcgttccaggggctcacgcagctgcggaagctgaacctctccttcaactaccagaagcgcgtgagcttcgcccacctgtccctggccccgagcttcggctccctcgtcgccctgaaggagctggacatgcacgggatcttcttccggagcctcgacgagaccaccctgcgccccctggcccggctccccatgctgcagaccctgcgcctccagatgaacttcatcaaccaggcgcagctgggcatcttccgggccttccccggcctgcgctacgtggacctctccgacaaccgcatcagcggggcctccgagctgacggccaccatgggcgaggccgacgggggcgagaaggtgtggctgcagccgggggacctcgcgcccgcccccgtcgacaccccgagctccgaggacttccggcccaactgcagcaccctgaacttcacgctggacctcagccgcaacaacctggtgaccgtgcagcccgagatgttcgcccagctgtcccacctccagtgcctgcggctgagccacaactgcatctcccaggccgtcaacggcagccagttcctccccctgaccggcctccaggtgctggacctgtcccacaacaagctggacctctaccacgagcacagcttcaccgagctgccgcgcctggaggcgctcgacctgtcctacaacagccagcccttcgggatgcagggcgtggggcacaacttctccttcgtcgcccacctccggacgctgcgccacctgagcctggcccacaacaacatccactcccaggtgagccagcagctctgctccaccagcctgcgggccctggacttctccggcaacgccctcgggcacatgtgggcggagggcgacctgtacctgcacttcttccagggcctcagcgggctgatctggctggacctctcccagaaccgcctgcacaccctgctcccccagaccctgcggaacctgcccaagagcctccaggtcctgcgcctgcgggacaactacctcgccttcttcaagtggtggagcctgcacttcctgccgaagctcgaggtgctggacctggccggcaaccagctcaaggccctgacgaacgggtccctgcccgccggcacccgcctccggcgcctggacgtgagctgcaactccatcagcttcgtcgcgcccgggttcttctccaaggccaaggagctgcgggagctcaacctgagcgccaacgccctgaagaccgtggaccactcctggttcggccccctcgccagcgcgctgcagatcctggacgtgtccgccaacccgctccactgcgcctgcggcgccgcgttcatggacttcctgctggaggtccaggccgccgtgcccgggctgcccagccgcgtgaagtgcggctcccccgggcagctccagggcctgagcatcttcgcccaggacctgcggctctgcctggacgaggccctgtcctgggactgcttcgcgctcagcctgctggccgtcgccctcggcctgggggtgccgatgctgcaccacctctgcggctgggacctgtggtactgcttccacctgtgcctcgcctggctgccctggcgcgggcggcagtccggccgcgacgaggacgccctgccctacgacgcgttcgtggtcttcgacaagacccagagcgccgtggccgactgggtgtacaacgagctccgcgggcagctggaggagtgccggggccgctgggccctgcacctctgcctggaggagcgggactggctgcccggcaagacgctgttcgagaacctgtgggcctccgtctacgggagccgcaagaccctgttcgtgctcgcgcacaccgaccgggtgtccggcctgctgcgcgccagcttcctcctggcccagcagcggctgctcgaggaccgcaaggacgtcgtggtgctggtcatcctgagcccggacgggcggcgctcccggtacgtgcgcctccggcagcgcctgtgccggcagagcgtgctgctctggccccaccagccctccggccagcgcagcttctgggcccagctggggatggcgctgacccgggacaaccaccacttctacaaccgcaacttctgccagggccccacggccgagtga

SEQ ID NO: 9812 - RNA, 3099 nt, synthetic construct
  misc_feature 1..3099: note = derived and/or modified sequence opt2 fromTLR9__Homo_sapiens__AAZ95518
  source 1..3099: mol_type = other RNA
atgggcttctgccgctccgccctccaccccctctccctcctcgtccaggccatcatgctcgccatgaccctcgccctcggcaccctccccgccttcctcccctgcgagctccagccccacggcctcgtcaactgcaactggctcttcctcaagtccgtcccccacttctccatggccgccccccgcggcaacgtcacctccctctccctctcctccaaccgcatccaccacctccacgactccgacttcgcccacctcccctccctccgccacctcaacctcaagtggaactgcccccccgtcggcctctcccccatgcacttcccctgccacatgaccatcgagccctccaccttcctcgccgtccccaccctcgaggagctcaacctctcctacaacaacatcatgaccgtccccgccctccccaagtccctcatctccctctccctctcccacaccaacatcctcatgctcgactccgcctccctcgccggcctccacgccctccgcttcctcttcatggacggcaactgctactacaagaacccctgccgccaggccctcgaggtcgcccccggcgccctcctcggcctcggcaacctcacccacctctccctcaagtacaacaacctcaccgtcgtcccccgcaacctcccctcctccctcgagtacctcctcctctcctacaaccgcatcgtcaagctcgcccccgaggacctcgccaacctcaccgccctccgcgtcctcgacgtcggcggcaactgccgccgctgcgaccacgcccccaacccctgcatggagtgcccccgccacttcccccagctccaccccgacaccttctcccacctctcccgcctcgagggcctcgtcctcaaggactcctccctctcctggctcaacgcctcctggttccgcggcctcggcaacctccgcgtcctcgacctctccgagaacttcctctacaagtgcatcaccaagaccaaggccttccagggcctcacccagctccgcaagctcaacctctccttcaactaccagaagcgcgtctccttcgcccacctctccctcgccccctccttcggctccctcgtcgccctcaaggagctcgacatgcacggcatcttcttccgctccctcgacgagaccaccctccgccccctcgcccgcctccccatgctccagaccctccgcctccagatgaacttcatcaaccaggcccagctcggcatcttccgcgccttccccggcctccgctacgtcgacctctccgacaaccgcatctccggcgcctccgagctcaccgccaccatgggcgaggccgacggcggcgagaaggtctggctccagcccggcgacctcgcccccgcccccgtcgacaccccctcctccgaggacttccgccccaactgctccaccctcaacttcaccctcgacctctcccgcaacaacctcgtcaccgtccagcccgagatgttcgcccagctctcccacctccagtgcctccgcctctcccacaactgcatctcccaggccgtcaacggctcccagttcctccccctcaccggcctccaggtcctcgacctctcccacaacaagctcgacctctaccacgagcactccttcaccgagctcccccgcctcgaggccctcgacctctcctacaactcccagcccttcggcatgcagggcgtcggccacaacttctccttcgtcgcccacctccgcaccctccgccacctctccctcgcccacaacaacatccactcccaggtctcccagcagctctgctccacctccctccgcgccctcgacttctccggcaacgccctcggccacatgtgggccgagggcgacctctacctccacttcttccagggcctctccggcctcatctggctcgacctctcccagaaccgcctccacaccctcctcccccagaccctccgcaacctccccaagtccctccaggtcctccgcctccgcgacaactacctcgccttcttcaagtggtggtccctccacttcctccccaagctcgaggtcctcgacctcgccggcaaccagctcaaggccctcaccaacggctccctccccgccggcacccgcctccgccgcctcgacgtctcctgcaactccatctccttcgtcgcccccggcttcttctccaaggccaaggagctccgcgagctcaacctctccgccaacgccctcaagaccgtcgaccactcctggttcggccccctcgcctccgccctccagatcctcgacgtctccgccaaccccctccactgcgcctgcggcgccgccttcatggacttcctcctcgaggtccaggccgccgtccccggcctcccctcccgcgtcaagtgcggctcccccggccagctccagggcctctccatcttcgcccaggacctccgcctctgcctcgacgaggccctctcctgggactgcttcgccctctccctcctcgccgtcgccctcggcctcggcgtccccatgctccaccacctctgcggctgggacctctggtactgcttccacctctgcctcgcctggctcccctggcgcggccgccagtccggccgcgacgaggacgccctcccctacgacgccttcgtcgtcttcgacaagacccagtccgccgtcgccgactgggtctacaacgagctccgcggccagctcgaggagtgccgcggccgctgggccctccacctctgcctcgaggagcgcgactggctccccggcaagaccctcttcgagaacctctgggcctccgtctacggctcccgcaagaccctcttcgtcctcgcccacaccgaccgcgtctccggcctcctccgcgcctccttcctcctcgcccagcagcgcctcctcgaggaccgcaaggacgtcgtcgtcctcgtcatcctctcccccgacggccgccgctcccgctacgtccgcctccgccagcgcctctgccgccagtccgtcctcctctggccccaccagccctccggccagcgctccttctgggcccagctcggcatggccctcacccgcgacaaccaccacttctacaaccgcaacttctgccagggccccaccgccgagtga

SEQ ID NO: 9813 - RNA, 3099 nt, synthetic construct
  misc_feature 1..3099: note = derived and/or modified sequence opt3 fromTLR9__Homo_sapiens__AAZ95518
  source 1..3099: mol_type = other RNA
atgggcttctgcagaagcgccctgcaccccctctcccttctggtgcaggctatcatgttggcaatgaccttagccctggggacactacctgcgtttctcccatgtgagctgcaaccgcatggacttgtcaactgcaattggctgttcttgaagtctgttccccacttttcaatggctgcccctaggggtaacgtgactagcctcagcctgtcctctaatcggattcatcaccttcatgactcggatttcgcacacctcccatcattacgccacctgaaccttaaatggaattgtccccctgtaggcttgagcccaatgcattttccctgccacatgacgatagaacctagtaccttcctggccgtgccaacactagaggaactcaacctgtcctacaataacatcatgactgtcccggctctgcccaagtctctgattagcttgtccctctcacataccaatatcctgatgttagacagtgcaagcctggccgggctccacgctctgcgatttctgttcatggatggaaactgttattacaaaaatccttgccgtcaggccttggaggtggcgccaggcgcactactgggtctcgggaacctgacacacctttctctgaagtataataacttgaccgttgtgcccagaaatctcccttcctcactggaatacttactgctaagctataacaggattgtcaaactcgccccagaggacctggctaaccttactgccttgcgggtgctggatgtaggaggcaattgtcgcagatgcgaccatgcacccaacccgtgtatggagtgccctaggcactttccccagctccatccagatacattcagtcacctgtctcggcttgaaggcctggttttgaaggactccagcctctcgtggctgaatgcttcttggtttcgcgggttaggaaacctgcgagtgctagatctctccgagaatttcctgtacaagtgtatcaccaaaacgaaggcctttcagggtcttactcaattgagaaaactgaacctctcattcaattatcagaagagggtcagtttcgcgcatctgagcttagccccttcctttggctctctggtggcacttaaagaattggacatgcacgggatattctttcggagcctcgatgagaccacactgcgtcccctagctcgcctgccaatgctccagactctgagacttcagatgaacttcatcaatcaagcccagttgggaatttttagggctttccccggcctgcggtacgtggacttatcagataaccgaatcagtggtgcctccgagctcaccgcaacaatgggggaagccgacggaggcgagaaggtctggctgcagcctggcgaccttgctccagcgccggttgatacccccagctctgaagactttcgccctaattgctcaacgctgaacttcactttggatctcagtagaaataacctggtgacagtacagccagagatgtttgcacaactaagccaccttcagtgcctcaggctgtcccataattgtatttctcaggccgtgaacgggtcgcaattccttcccttgaccggactgcaggtcttagacctcagccacaacaagctggatctttaccatgaacactcctttactgagctgcctcggctagaggctctcgacctgtcatataatagtcagccattcggtatgcagggcgtggggcacaacttttctttcgttgcccatttgcgcacactgagacacttaagcctcgcacataataacatccactcccaagtgtcacagcagctgtgcagcacctctcttagggccctggatttctccggaaatgctttgggccatatgtgggccgaaggtgacctctacctgcactttttccaggggctaagtggcctgatatggcttgatctcagccaaaaccgtctgcacacgttgctgccccagaccttacggaatctcccgaaatctctgcaggtccttcgactgagagacaactatttggcatttttcaagtggtggtccctccattttctgcctaaactagaggtgctggatcttgcgggaaatcagctcaaggctctgacaaacggctcattgccagccgggactaggttacgccggctggacgtaagttgtaatagcatttcgttcgttgcacccggatttttctccaaagccaaggaactcagagagctgaacctttctgctaatgccctgaaaaccgtggaccacagctggtttggtcctttggcatcagctctacaaatcctggatgtcagtgccaaccccctccattgcgcgtgtggcgccgctttcatggactttctgcttgaagtgcaggcagccgtcccagggttaccttccagggtgaagtgcggatctcccggccagctgcagggtctcagcattttcgctcaagatttgcgcctgtgtctcgacgaggccctgtcctgggattgctttgcactttcactgttggcggttgccctagggctgggcgtgccaatgctccaccatttatgtggatgggacctgtggtactgcttccacctttgtctggcttggctcccgtggcgaggccggcagagcgggcgtgatgaggacgccttgccttatgatgcattcgtagtctttgacaagacacagagtgctgtggccgattgggtttacaatgaactgagaggacaactcgaggaatgcaggggtcgctgggcactgcacctttgcctagaggaacgggactggctgcccggcaaaactttgttcgagaacttatgggcctctgtgtatgggtccagaaagaccctgtttgtcctcgctcatacagatagggtgagcggactgcttcgagcgtcgttcctgctcgcccagcagcgcttgctggaggaccggaaagacgtagtggttctagtcatcctgtcaccagatggcagaaggtctcgttacgtgcgcctccggcagagactttgtaggcaaagtgtgctgttatggccccaccagccttccggtcagcgaagtttttgggcacagttggggatggctctgacccgggacaaccatcacttctacaatcgcaacttttgccaaggcccaactgccgaatga

SEQ ID NO: 9814 - RNA, 3099 nt, synthetic construct
  misc_feature 1..3099: note = derived and/or modified sequence opt4 fromTLR9__Homo_sapiens__AAZ95518
  source 1..3099: mol_type = other RNA
atgggcttctgcagaagcgccctgcaccccctgagcctgctggtgcaggccatcatgctggccatgaccctggccctgggcaccctgcccgccttcctgccctgcgagctgcagccccacggcctggtgaactgcaactggctgttcctgaagagcgtgccccacttcagcatggccgcccccagaggcaacgtgaccagcctgagcctgagcagcaacagaatccaccacctgcacgacagcgacttcgcccacctgcccagcctgagacacctgaacctgaagtggaactgcccccccgtgggcctgagccccatgcacttcccctgccacatgaccatcgagcccagcaccttcctggccgtgcccaccctggaggagctgaacctgagctacaacaacatcatgaccgtgcccgccctgcccaagagcctgatcagcctgagcctgagccacaccaacatcctgatgctggacagcgccagcctggccggcctgcacgccctgagattcctgttcatggacggcaactgctactacaagaacccctgcagacaggccctggaggtggcccccggcgccctgctgggcctgggcaacctgacccacctgagcctgaagtacaacaacctgaccgtggtgcccagaaacctgcccagcagcctggagtacctgctgctgagctacaacagaatcgtgaagctggcccccgaggacctggccaacctgaccgccctgagagtgctggacgtgggcggcaactgcagaagatgcgaccacgcccccaacccctgcatggagtgccccagacacttcccccagctgcaccccgacaccttcagccacctgagcagactggagggcctggtgctgaaggacagcagcctgagctggctgaacgccagctggttcagaggcctgggcaacctgagagtgctggacctgagcgagaacttcctgtacaagtgcatcaccaagaccaaggccttccagggcctgacccagctgagaaagctgaacctgagcttcaactaccagaagagagtgagcttcgcccacctgagcctggcccccagcttcggcagcctggtggccctgaaggagctggacatgcacggcatcttcttcagaagcctggacgagaccaccctgagacccctggccagactgcccatgctgcagaccctgagactgcagatgaacttcatcaaccaggcccagctgggcatcttcagagccttccccggcctgagatacgtggacctgagcgacaacagaatcagcggcgccagcgagctgaccgccaccatgggcgaggccgacggcggcgagaaggtgtggctgcagcccggcgacctggcccccgcccccgtggacacccccagcagcgaggacttcagacccaactgcagcaccctgaacttcaccctggacctgagcagaaacaacctggtgaccgtgcagcccgagatgttcgcccagctgagccacctgcagtgcctgagactgagccacaactgcatcagccaggccgtgaacggcagccagttcctgcccctgaccggcctgcaggtgctggacctgagccacaacaagctggacctgtaccacgagcacagcttcaccgagctgcccagactggaggccctggacctgagctacaacagccagcccttcggcatgcagggcgtgggccacaacttcagcttcgtggcccacctgagaaccctgagacacctgagcctggcccacaacaacatccacagccaggtgagccagcagctgtgcagcaccagcctgagagccctggacttcagcggcaacgccctgggccacatgtgggccgagggcgacctgtacctgcacttcttccagggcctgagcggcctgatctggctggacctgagccagaacagactgcacaccctgctgccccagaccctgagaaacctgcccaagagcctgcaggtgctgagactgagagacaactacctggccttcttcaagtggtggagcctgcacttcctgcccaagctggaggtgctggacctggccggcaaccagctgaaggccctgaccaacggcagcctgcccgccggcaccagactgagaagactggacgtgagctgcaacagcatcagcttcgtggcccccggcttcttcagcaaggccaaggagctgagagagctgaacctgagcgccaacgccctgaagaccgtggaccacagctggttcggccccctggccagcgccctgcagatcctggacgtgagcgccaaccccctgcactgcgcctgcggcgccgccttcatggacttcctgctggaggtgcaggccgccgtgcccggcctgcccagcagagtgaagtgcggcagccccggccagctgcagggcctgagcatcttcgcccaggacctgagactgtgcctggacgaggccctgagctgggactgcttcgccctgagcctgctggccgtggccctgggcctgggcgtgcccatgctgcaccacctgtgcggctgggacctgtggtactgcttccacctgtgcctggcctggctgccctggagaggcagacagagcggcagagacgaggacgccctgccctacgacgccttcgtggtgttcgacaagacccagagcgccgtggccgactgggtgtacaacgagctgagaggccagctggaggagtgcagaggcagatgggccctgcacctgtgcctggaggagagagactggctgcccggcaagaccctgttcgagaacctgtgggccagcgtgtacggcagcagaaagaccctgttcgtgctggcccacaccgacagagtgagcggcctgctgagagccagcttcctgctggcccagcagagactgctggaggacagaaaggacgtggtggtgctggtgatcctgagccccgacggcagaagaagcagatacgtgagactgagacagagactgtgcagacagagcgtgctgctgtggccccaccagcccagcggccagagaagcttctgggcccagctgggcatggccctgaccagagacaaccaccacttctacaacagaaacttctgccagggccccaccgccgagtga

SEQ ID NO: 9815 - RNA, 3099 nt, synthetic construct
  misc_feature 1..3099: note = derived and/or modified sequence opt5 fromTLR9__Homo_sapiens__AAZ95518
  source 1..3099: mol_type = other RNA
atgggcttctgcagaagcgccctgcaccccctctccctgcttgtgcaggctatcatgctggccatgaccctcgcgctggggacacttcctgcttttctgccgtgtgagctccaaccccatggactggtcaactgcaattggctgttcctcaagtctgttcctcactttagcatggccgctccccggggcaacgtgacgtccctgtctcttagctccaatcgcattcatcatctgcacgactctgatttcgctcacctccctagcctgagacaccttaacctgaaatggaattgtccccctgtggggctctccccgatgcattttccctgccacatgaccatcgaacctagcacattcctggccgtccccaccctggaggaactcaacctgtcttacaataacattatgacagtgcctgctctgcccaagtccctgatcagcctctctctgtcccataccaatattcttatgctggacagcgcctctctcgcgggactgcacgccctgcggtttctcttcatggatggcaactgttattacaaaaatccgtgccgccaggctctggaggttgcccctggggcccttctgggactcggcaacctgacacacctttccctgaagtataataacctcaccgtggtccccagaaatctgcctagctccctggaatacctcctgctttcttataaccggatcgtgaaactggcccccgaggacctcgcgaacctgacggccctgcgcgttcttgatgtgggcgggaattgtagacggtgcgaccatgctcccaacccttgtatggagtgcccgcgccactttccccagctccatcctgataccttcagccacctgtccagactggaaggactcgtcctgaaggacagctctctttcctggctgaatgccagctggtttcggggcctcgggaacctgcgcgtgctggatctttctgagaatttcctctacaagtgtatcacaaaaaccaaggcttttcagggactgacacaactgagaaaactcaacctgagcttcaattatcagaagcgggtgtccttcgcccatctttctctggcccccagctttggctccctcgtcgctctgaaagaactggacatgcacgggattttctttcgcagccttgatgagaccacgctcagacctctggcgcggctgcccatgctccagacactgagacttcagatgaacttcatcaatcaagcccagctgggaatttttcgcgctttcccgggcctccggtacgttgacctgtctgataacagaatctccggcgccagcgagctgaccgccacaatgggggaagctgacggaggcgagaaggtgtggcttcagcctggggacctcgcccccgcgcctgtggataccccctcttccgaagactttcgccctaattgcagcaccctgaacttcacactggatctctcccggaataacctggtcacggtgcagcccgagatgtttgctcaactttctcatctgcagtgcctcagactgagccacaattgtatttcccaggccgttaacggatctcaattcctgccgcttaccggccttcaggtgctcgacctgagccacaacaagctcgatctgtaccatgaacactcctttacagagcttcctcgcctggaggccctcgacctgagctataattctcagcccttcgggatgcagggagtcggccacaacttttccttcgtggctcatctgcggacccttagacacctgagcctcgcccataataacatccactctcaagtttcccagcagctgtgcagcacatctctccgcgctctggatttcagcggcaatgcccttgggcatatgtgggcggaaggagacctgtacctccactttttccagggcctgtccgggctgatttggcttgatctgagccaaaaccggctccacaccctgctcccccagacgctgagaaatcttcctaaatctctccaggtgctgcgcctgcgggacaactatctggcctttttcaagtggtggtcccttcattttctgccgaaactcgaggtcctggatctcgctggaaatcagctgaaggcccttacaaacggcagcctgcccgctgggaccagactgcggcgcctcgacgtgtcctgtaattctatcagcttcgtcgcccctggctttttctccaaagcgaaggaactgagagagcttaacctgtctgccaatgctctcaaaaccgtggaccacagctggtttggacccctggcctccgctctccaaatcctggatgtttctgccaaccctcttcattgcgcctgtggcgctgcgttcatggactttctgctggaagtgcaggccgctgtccccgggctccctagccgggtgaagtgcggatcccccggccagctgcaggggcttagcattttcgcccaagatctgagactctgtctggacgaggccctctcttgggattgctttgctctgtcccttctggccgttgcgctgggactcggcgtgccgatgctgcaccatctttgtgggtgggacctgtggtactgcttccacctctgtctggcttggctgccttggcgcggccggcagagcggaagagatgaggacgccctcccctatgatgccttcgtcgtgtttgacaagacacagtctgctgtggccgattgggtttacaatgaacttcgcggccaactggaggaatgcagagggcggtgggcgctgcacctctgcctggaggaacgcgactggcttcctggaaaaaccctgttcgagaacctctgggcttccgtctatggcagcagaaagacactgtttgtgctggcccatacggatcgggtgtctgggctccttcgcgcctccttcctgctggctcagcagagactcctggaggaccggaaagacgtcgtggttcttgtgatcctgagccccgatggacgcagatcccggtacgtccgcctcagacagcggctgtgtagacaaagcgtgctgctctggccgcaccagccttctggccagcgcagcttttgggcccagcttgggatggctctgacccgggacaaccatcacttctacaatagaaacttttgccaaggccccacagccgaatga

SEQ ID NO: 9816 - protein, 1032 aa, synthetic construct [sequence omitted]

SEQ ID NO: 9817 - RNA, 3099 nt, synthetic construct
  misc_feature 1..3099: note = TLR9__Homo_sapiens__AAZ95519
  source 1..3099: mol_type = other RNA
atgggtttctgccgcagcgccctgcacccgctgtctctcctggtgcaggccatcatgctggccatgaccctggccctgggtaccttgcctgccttcctaccctgtgagctccagccccacggcctggtgaactgcaactggctgttcctgaagtctgtgccccacttctccatggcagcaccccgtggcaatgtcaccagcctttccttgtcctccaaccgcatccaccacctccatgattctgactttgcccacctgcccagcctgcggcatctcaacctcaagtggaactgcccgccggttggcctcagccccatgcacttcccctgccacatgaccatcgagcccagcaccttcttggctgtgcccaccctggaagagctaaacctgagctacaacaacatcatgactgtgcctgcgctgcccaaatccctcatatccctgtccctcagccataccaacatcctgatgctagactctgccagcctcgccggcctgcatgccctgcgcttcctattcatggacggcaactgttattacaagaacccctgcaggcaggcactggaggtggccccgggtgccctccttggcctgggcaacctcacccacctgtcactcaagtacaacaacctcactgtggtgccccgcaacctgccttccagcctggagtatctgctgttgtcctacaaccgcatcgtcaaactggcgcctgaggacctggccaatctgaccgccctgcgtgtgctcgatgtgggcggaaattgccgccgctgcgaccacgctcccaacccctgcatggagtgccctcgtcacttcccccagctacatcccgataccttcagccacctgagccgtcttgaaggcctggtgttgaaggacagttctctctcctggctgaatgccagttggttccgtgggctgggaaacctccaagtgctggacctgagtgagaacttcctctacaaatgcatcactaaaaccaaggccttccagggcctaacacagctgcgcaagcttaacctgtccttcaattaccaaaagagggtgtcctttgcccacctgtctctggccccttccttcgggagcctggtcgccctgaaggagctggacatgcacggcatcttcttccgctcactcgatgagaccacgctccggccactggcccgcctgcccatgctccagactctgcgtctgcagatgaacttcatcaaccaggcccagctcggcatcttcagggccttccctggcctgcgctacgtggacctgtcggacaaccgcatcagcggagcttcggagctgacagccaccatgggggaggcagatggaggggagaaggtctggctgcagcctggggaccttgctccggccccagtggacactcccagctctgaagacttcaggcccaactgcagcaccctcaacttcaccttggatctgtcacggaacaacctggtgaccgtgcagccggagatgtttgcccagctctcgcacctgcagtgcctgcgcctgagccacaactgcatctcgcaggcagtcaatggctcccagttcctgccgctgaccggtctgcaggtgctagacctgtcccacaataagctggacctctaccacgagcactcattcacggagctaccacgactggaggccctggacctcagctacaacagccagccctttggcatgcagggcgtgggccacaacttcagcttcgtggctcacctgcgcaccctgcgccacctcagcctggcccacaacaacatccacagccaagtgtcccagcagctctgcagtacgtcgctgcgggccctggacttcagcggcaatgcactgggccatatgtgggccgagggagacctctatctgcacttcttccaaggcctgagcggtttgatctggctggacttgtcccagaaccgcctgcacaccctcctgccccaaaccctgcgcaacctccccaagagcctacaggtgctgcgtctccgtgacaattacctggccttctttaagtggtggagcctccacttcctgcccaaactggaagtcctcgacctggcaggaaaccagctgaaggccctgaccaatggcagcctgcctgctggcacccggctccggaggctggatgtcagctgcaacagcatcagcttcgtggcccccggcttcttttccaaggccaaggagctgcgagagctcaaccttagcgccaacgccctcaagacagtggaccactcctggtttgggcccctggcgagtgccctgcaaatactagatgtaagcgccaaccctctgcactgcgcctgtggggcggcctttatggacttcctgctggaggtgcaggctgccgtgcccggtctgcccagccgggtgaagtgtggcagtccgggccagctccagggcctcagcatctttgcacaggacctgcgcctctgcctggatgaggccctctcctgggactgtttcgccctctcgctgctggctgtggctctgggcctgggtgtgcccatgctgcatcacctctgtggctgggacctctggtactgcttccacctgtgcctggcctggcttccctggcgggggcggcaaagtgggcgagatgaggatgccctgccctacgatgccttcgtggtcttcgacaaaacgcagagcgcagtggcagactgggtgtacaacgagcttcgggggcagctggaggagtgccgtgggcgctgggcactccgcctgtgcctggaggaacgcgactggctgcctggcaaaaccctctttgagaacctgtgggcctcggtctatggcagccgcaagacgctgtttgtgctggcccacacggaccgggtcagtggtctcttgcgcgccagcttcctgctggcccagcagcgcctgctggaggaccgcaaggacgtcgtggtgctggtgatcctgagccctgacggccgccgctcccgctacgtgcggctgcgccagcgcctctgccgccagagtgtcctcctctggccccaccagcccagtggtcagcgcagcttctgggcccagctgggcatggccctgaccagggacaaccaccacttctataaccggaacttctgccagggacccacggccgaatag

SEQ ID NO: 9818 - RNA, 3099 nt, synthetic construct
  misc_feature 1..3099: note = derived and/or modified sequence opt1 fromTLR9__Homo_sapiens__AAZ95519
  source 1..3099: mol_type = other RNA
atgggcttctgccgcagcgccctgcaccccctctccctgctggtgcaggccatcatgctcgcgatgaccctggccctggggaccctcccggccttcctgccctgcgagctgcagccccacggcctcgtcaactgcaactggctgttcctgaagtccgtgccccacttcagcatggccgccccgcgggggaacgtgacgagcctctccctgagctccaaccgcatccaccacctccacgacagcgacttcgcgcacctcccctccctgcggcacctgaacctcaagtggaactgcccgcccgtcggcctgagccccatgcacttcccctgccacatgaccatcgagccctccaccttcctggccgtgcccaccctcgaggagctgaacctgagctacaacaacatcatgacggtgccggccctccccaagtccctgatcagcctgtccctcagccacaccaacatcctgatgctggactccgccagcctcgcggggctgcacgccctgcgcttcctcttcatggacggcaactgctactacaagaacccctgccggcaggccctggaggtcgcccccggcgccctgctcgggctgggcaacctgacccacctctccctgaagtacaacaacctgaccgtggtgccgcgcaacctccccagcagcctggagtacctgctcctgtcctacaaccggatcgtcaagctggcgcccgaggacctcgccaacctgacggccctgcgcgtgctggacgtcgggggcaactgccggcgctgcgaccacgcccccaacccgtgcatggagtgcccccggcacttcccccagctccaccccgacaccttcagccacctgtcccgcctggaggggctcgtgctgaaggacagctccctgagctggctcaacgcctcctggttccggggcctgggcaacctccaggtgctggacctgagcgagaacttcctgtacaagtgcatcaccaagaccaaggcgttccaggggctcacgcagctgcgcaagctgaacctctccttcaactaccagaagcgggtgagcttcgcccacctgtccctggccccgagcttcggctccctcgtcgccctgaaggagctggacatgcacgggatcttcttccgcagcctcgacgagaccaccctgcggcccctggcccgcctccccatgctgcagaccctgcggctccagatgaacttcatcaaccaggcgcagctgggcatcttccgcgccttccccggcctgcggtacgtggacctctccgacaaccgcatcagcggggcctccgagctgacggccaccatgggcgaggccgacgggggcgagaaggtgtggctgcagccgggggacctcgcgcccgcccccgtcgacaccccgagctccgaggacttccgccccaactgcagcaccctgaacttcacgctggacctcagccggaacaacctggtgaccgtgcagcccgagatgttcgcccagctgtcccacctccagtgcctgcgcctgagccacaactgcatctcccaggccgtcaacggcagccagttcctccccctgaccggcctccaggtgctggacctgtcccacaacaagctggacctctaccacgagcacagcttcaccgagctgccgcggctggaggcgctcgacctgtcctacaacagccagcccttcgggatgcagggcgtggggcacaacttctccttcgtcgcccacctccgcacgctgcggcacctgagcctggcccacaacaacatccactcccaggtgagccagcagctctgctccaccagcctgcgcgccctggacttctccggcaacgccctcgggcacatgtgggcggagggcgacctgtacctgcacttcttccagggcctcagcgggctgatctggctggacctctcccagaaccggctgcacaccctgctcccccagaccctgcgcaacctgcccaagagcctccaggtcctgcggctgcgcgacaactacctcgccttcttcaagtggtggagcctgcacttcctgccgaagctcgaggtgctggacctggccggcaaccagctcaaggccctgacgaacgggtccctgcccgccggcacccggctccgccggctggacgtgagctgcaactccatcagcttcgtcgcgcccgggttcttctccaaggccaaggagctgcgcgagctcaacctgagcgccaacgccctgaagaccgtggaccactcctggttcggccccctcgccagcgcgctgcagatcctggacgtgtccgccaacccgctccactgcgcctgcggcgccgcgttcatggacttcctgctggaggtccaggccgccgtgcccgggctgcccagccgggtgaagtgcggctcccccgggcagctccagggcctgagcatcttcgcccaggacctgcgcctctgcctggacgaggccctgtcctgggactgcttcgcgctcagcctgctggccgtcgccctcggcctgggggtgccgatgctgcaccacctctgcggctgggacctgtggtactgcttccacctgtgcctcgcctggctgccctggcgggggcgccagtccggccgggacgaggacgccctgccctacgacgcgttcgtggtcttcgacaagacccagagcgccgtggccgactgggtgtacaacgagctccgcgggcagctggaggagtgccgcggccggtgggccctgcgcctctgcctggaggagcgggactggctgcccggcaagacgctgttcgagaacctgtgggcctccgtctacgggagccgcaagaccctgttcgtgctcgcgcacaccgaccgggtgtccggcctgctgcgcgccagcttcctcctggcccagcagcggctgctcgaggaccgcaaggacgtcgtggtgctggtcatcctgagcccggacgggcggcgctcccggtacgtgcgcctccggcagcgcctgtgccggcagagcgtgctgctctggccccaccagccctccggccagcgcagcttctgggcccagctggggatggcgctgacccgggacaaccaccacttctacaaccgcaacttctgccagggccccacggccgagtga

SEQ ID NO: 9819 - RNA, 3099 nt, synthetic construct
  misc_feature 1..3099: note = derived and/or modified sequence opt2 fromTLR9__Homo_sapiens__AAZ95519
  source 1..3099: mol_type = other RNA
atgggcttctgccgctccgccctccaccccctctccctcctcgtccaggccatcatgctcgccatgaccctcgccctcggcaccctccccgccttcctcccctgcgagctccagccccacggcctcgtcaactgcaactggctcttcctcaagtccgtcccccacttctccatggccgccccccgcggcaacgtcacctccctctccctctcctccaaccgcatccaccacctccacgactccgacttcgcccacctcccctccctccgccacctcaacctcaagtggaactgcccccccgtcggcctctcccccatgcacttcccctgccacatgaccatcgagccctccaccttcctcgccgtccccaccctcgaggagctcaacctctcctacaacaacatcatgaccgtccccgccctccccaagtccctcatctccctctccctctcccacaccaacatcctcatgctcgactccgcctccctcgccggcctccacgccctccgcttcctcttcatggacggcaactgctactacaagaacccctgccgccaggccctcgaggtcgcccccggcgccctcctcggcctcggcaacctcacccacctctccctcaagtacaacaacctcaccgtcgtcccccgcaacctcccctcctccctcgagtacctcctcctctcctacaaccgcatcgtcaagctcgcccccgaggacctcgccaacctcaccgccctccgcgtcctcgacgtcggcggcaactgccgccgctgcgaccacgcccccaacccctgcatggagtgcccccgccacttcccccagctccaccccgacaccttctcccacctctcccgcctcgagggcctcgtcctcaaggactcctccctctcctggctcaacgcctcctggttccgcggcctcggcaacctccaggtcctcgacctctccgagaacttcctctacaagtgcatcaccaagaccaaggccttccagggcctcacccagctccgcaagctcaacctctccttcaactaccagaagcgcgtctccttcgcccacctctccctcgccccctccttcggctccctcgtcgccctcaaggagctcgacatgcacggcatcttcttccgctccctcgacgagaccaccctccgccccctcgcccgcctccccatgctccagaccctccgcctccagatgaacttcatcaaccaggcccagctcggcatcttccgcgccttccccggcctccgctacgtcgacctctccgacaaccgcatctccggcgcctccgagctcaccgccaccatgggcgaggccgacggcggcgagaaggtctggctccagcccggcgacctcgcccccgcccccgtcgacaccccctcctccgaggacttccgccccaactgctccaccctcaacttcaccctcgacctctcccgcaacaacctcgtcaccgtccagcccgagatgttcgcccagctctcccacctccagtgcctccgcctctcccacaactgcatctcccaggccgtcaacggctcccagttcctccccctcaccggcctccaggtcctcgacctctcccacaacaagctcgacctctaccacgagcactccttcaccgagctcccccgcctcgaggccctcgacctctcctacaactcccagcccttcggcatgcagggcgtcggccacaacttctccttcgtcgcccacctccgcaccctccgccacctctccctcgcccacaacaacatccactcccaggtctcccagcagctctgctccacctccctccgcgccctcgacttctccggcaacgccctcggccacatgtgggccgagggcgacctctacctccacttcttccagggcctctccggcctcatctggctcgacctctcccagaaccgcctccacaccctcctcccccagaccctccgcaacctccccaagtccctccaggtcctccgcctccgcgacaactacctcgccttcttcaagtggtggtccctccacttcctccccaagctcgaggtcctcgacctcgccggcaaccagctcaaggccctcaccaacggctccctccccgccggcacccgcctccgccgcctcgacgtctcctgcaactccatctccttcgtcgcccccggcttcttctccaaggccaaggagctccgcgagctcaacctctccgccaacgccctcaagaccgtcgaccactcctggttcggccccctcgcctccgccctccagatcctcgacgtctccgccaaccccctccactgcgcctgcggcgccgccttcatggacttcctcctcgaggtccaggccgccgtccccggcctcccctcccgcgtcaagtgcggctcccccggccagctccagggcctctccatcttcgcccaggacctccgcctctgcctcgacgaggccctctcctgggactgcttcgccctctccctcctcgccgtcgccctcggcctcggcgtccccatgctccaccacctctgcggctgggacctctggtactgcttccacctctgcctcgcctggctcccctggcgcggccgccagtccggccgcgacgaggacgccctcccctacgacgccttcgtcgtcttcgacaagacccagtccgccgtcgccgactgggtctacaacgagctccgcggccagctcgaggagtgccgcggccgctgggccctccgcctctgcctcgaggagcgcgactggctccccggcaagaccctcttcgagaacctctgggcctccgtctacggctcccgcaagaccctcttcgtcctcgcccacaccgaccgcgtctccggcctcctccgcgcctccttcctcctcgcccagcagcgcctcctcgaggaccgcaaggacgtcgtcgtcctcgtcatcctctcccccgacggccgccgctcccgctacgtccgcctccgccagcgcctctgccgccagtccgtcctcctctggccccaccagccctccggccagcgctccttctgggcccagctcggcatggccctcacccgcgacaaccaccacttctacaaccgcaacttctgccagggccccaccgccgagtga

SEQ ID NO: 9820 - RNA, 3099 nt, synthetic construct
  misc_feature 1..3099: note = derived and/or modified sequence opt3 fromTLR9__Homo_sapiens__AAZ95519
  source 1..3099: mol_type = other RNA
atgggcttctgcagaagcgccctgcaccccctctcccttctggtgcaggctatcatgttggcaatgaccttagccctggggacactacctgcgtttctcccatgtgagctgcaaccgcatggacttgtcaactgcaattggctgttcttgaagtctgttccccacttttcaatggctgcccctaggggtaacgtgactagcctcagcctgtcctctaatcggattcatcaccttcatgactcggatttcgcacacctcccatcattacgccacctgaaccttaaatggaattgtccccctgtaggcttgagcccaatgcattttccctgccacatgacgatagaacctagtaccttcctggccgtgccaacactagaggaactcaacctgtcctacaataacatcatgactgtcccggctctgcccaagtctctgattagcttgtccctctcacataccaatatcctgatgttagacagtgcaagcctggccgggctccacgctctgcgatttctgttcatggatggaaactgttattacaaaaatccttgccgtcaggccttggaggtggcgccaggcgcactactgggtctcgggaacctgacacacctttctctgaagtataataacttgaccgttgtgcccagaaatctcccttcctcactggaatacttactgctaagctataacaggattgtcaaactcgccccagaggacctggctaaccttactgccttgcgggtgctggatgtaggaggcaattgtcgcagatgcgaccatgcacccaacccgtgtatggagtgccctaggcactttccccagctccatccagatacattcagtcacctgtctcggcttgaaggcctggttttgaaggactccagcctctcgtggctgaatgcttcttggtttcgcgggttaggaaaccttcaggtgctagatctctccgagaatttcctgtacaagtgtatcaccaaaacgaaggcctttcaaggtcttactcagttgcgaaaactgaacctctcattcaattatcagaagagagtcagtttcgcgcatctgagcttagccccttcctttggctctctggtggcacttaaagaattggacatgcacgggatattctttaggagcctcgatgagaccacactgcggcccctagctcgtctgccaatgctccagactctgcgccttcaaatgaacttcatcaatcaggcccagttgggaatttttagagctttccccggcctgaggtacgtggacttatcagataaccggatcagtggtgcctccgagctcaccgcaacaatgggggaagccgacggaggcgagaaggtctggctgcagcctggcgaccttgctccagcgccggttgatacccccagctctgaagactttcgacctaattgctcaacgctgaacttcactttggatctcagtcgcaataacctggtgacagtacaaccagagatgtttgcacagctaagccatctgcagtgcctcagactgtcccacaattgtatttctcaagccgtgaacgggtcgcagttccttcccttgaccggactgcaggtcttagacctcagccacaacaagctggatctttaccatgaacactcctttactgagctgcctaggctagaggctctcgacctgtcatataatagtcagccattcggtatgcaaggcgtggggcacaacttttctttcgttgcccatttgcggacactgcgccacttaagcctcgcacataataacatccactcccaggtgtcacagcagctgtgcagcacctctcttagagccctggatttctccggaaatgctttgggccatatgtgggccgaaggtgacctctacctgcactttttccaagggctaagtggcctgatatggcttgatctcagccagaacaggctgcacacgttgctgccccagaccttacgtaatctcccgaaatctctgcaggtccttcggctgcgagacaactatttggcatttttcaagtggtggtccctccattttctgcctaaactagaggtgctggatcttgcgggaaatcaactcaaggctctgacaaacggctcattgccagccgggactagattaaggcgcctggacgtaagttgtaatagcatttcgttcgttgcacccggatttttctccaaagccaaggaactccgggagctgaacctttctgctaatgccctgaaaaccgtggaccacagctggtttggtcctttggcatcagctctacagatcctggatgtcagtgccaaccccctccattgcgcgtgtggcgccgctttcatggactttctgcttgaagtgcaggcagccgtcccagggttaccttccagagtgaagtgcggatctcccggccagctgcaaggtctcagcattttcgctcaggatttgaggctgtgtctcgacgaggccctgtcctgggattgctttgcactttcactgttggcggttgccctagggctgggcgtgccaatgctccaccatttatgtggatgggacctgtggtactgcttccacctttgtctggcttggctcccgtggcgcggccgacagagcgggcgggatgaggacgccttgccttatgatgcattcgtagtctttgacaagacacaaagtgctgtggccgattgggtttacaatgaactgcgtggacagctcgaggaatgcagaggtaggtgggcactgcgcctttgcctagaggaacgggactggctgcccggcaaaactttgttcgagaacttatgggcctctgtgtatgggtccagaaagaccctgtttgtcctcgctcacacagatagggtgagcggactgcttcgagcgtcgttcctgctcgcccagcagcgcttgctggaggaccggaaagacgtagtggttctagtcatcctgtcaccagatggcagaaggtctcgttacgtgcgcctccggcaaagactttgtaggcagagtgtgctgttatggccccatcagccttccggtcagcgaagtttttgggcacaattggggatggctctgacccgggacaaccaccatttctacaatcgcaacttttgccagggcccaactgccgaatga

SEQ ID NO: 9821 - RNA, 3099 nt, synthetic construct
  misc_feature 1..3099: note = derived and/or modified sequence opt4 fromTLR9__Homo_sapiens__AAZ95519
  source 1..3099: mol_type = other RNA
atgggcttctgcagaagcgccctgcaccccctgagcctgctggtgcaggccatcatgctggccatgaccctggccctgggcaccctgcccgccttcctgccctgcgagctgcagccccacggcctggtgaactgcaactggctgttcctgaagagcgtgccccacttcagcatggccgcccccagaggcaacgtgaccagcctgagcctgagcagcaacagaatccaccacctgcacgacagcgacttcgcccacctgcccagcctgagacacctgaacctgaagtggaactgcccccccgtgggcctgagccccatgcacttcccctgccacatgaccatcgagcccagcaccttcctggccgtgcccaccctggaggagctgaacctgagctacaacaacatcatgaccgtgcccgccctgcccaagagcctgatcagcctgagcctgagccacaccaacatcctgatgctggacagcgccagcctggccggcctgcacgccctgagattcctgttcatggacggcaactgctactacaagaacccctgcagacaggccctggaggtggcccccggcgccctgctgggcctgggcaacctgacccacctgagcctgaagtacaacaacctgaccgtggtgcccagaaacctgcccagcagcctggagtacctgctgctgagctacaacagaatcgtgaagctggcccccgaggacctggccaacctgaccgccctgagagtgctggacgtgggcggcaactgcagaagatgcgaccacgcccccaacccctgcatggagtgccccagacacttcccccagctgcaccccgacaccttcagccacctgagcagactggagggcctggtgctgaaggacagcagcctgagctggctgaacgccagctggttcagaggcctgggcaacctgcaggtgctggacctgagcgagaacttcctgtacaagtgcatcaccaagaccaaggccttccagggcctgacccagctgagaaagctgaacctgagcttcaactaccagaagagagtgagcttcgcccacctgagcctggcccccagcttcggcagcctggtggccctgaaggagctggacatgcacggcatcttcttcagaagcctggacgagaccaccctgagacccctggccagactgcccatgctgcagaccctgagactgcagatgaacttcatcaaccaggcccagctgggcatcttcagagccttccccggcctgagatacgtggacctgagcgacaacagaatcagcggcgccagcgagctgaccgccaccatgggcgaggccgacggcggcgagaaggtgtggctgcagcccggcgacctggcccccgcccccgtggacacccccagcagcgaggacttcagacccaactgcagcaccctgaacttcaccctggacctgagcagaaacaacctggtgaccgtgcagcccgagatgttcgcccagctgagccacctgcagtgcctgagactgagccacaactgcatcagccaggccgtgaacggcagccagttcctgcccctgaccggcctgcaggtgctggacctgagccacaacaagctggacctgtaccacgagcacagcttcaccgagctgcccagactggaggccctggacctgagctacaacagccagcccttcggcatgcagggcgtgggccacaacttcagcttcgtggcccacctgagaaccctgagacacctgagcctggcccacaacaacatccacagccaggtgagccagcagctgtgcagcaccagcctgagagccctggacttcagcggcaacgccctgggccacatgtgggccgagggcgacctgtacctgcacttcttccagggcctgagcggcctgatctggctggacctgagccagaacagactgcacaccctgctgccccagaccctgagaaacctgcccaagagcctgcaggtgctgagactgagagacaactacctggccttcttcaagtggtggagcctgcacttcctgcccaagctggaggtgctggacctggccggcaaccagctgaaggccctgaccaacggcagcctgcccgccggcaccagactgagaagactggacgtgagctgcaacagcatcagcttcgtggcccccggcttcttcagcaaggccaaggagctgagagagctgaacctgagcgccaacgccctgaagaccgtggaccacagctggttcggccccctggccagcgccctgcagatcctggacgtgagcgccaaccccctgcactgcgcctgcggcgccgccttcatggacttcctgctggaggtgcaggccgccgtgcccggcctgcccagcagagtgaagtgcggcagccccggccagctgcagggcctgagcatcttcgcccaggacctgagactgtgcctggacgaggccctgagctgggactgcttcgccctgagcctgctggccgtggccctgggcctgggcgtgcccatgctgcaccacctgtgcggctgggacctgtggtactgcttccacctgtgcctggcctggctgccctggagaggcagacagagcggcagagacgaggacgccctgccctacgacgccttcgtggtgttcgacaagacccagagcgccgtggccgactgggtgtacaacgagctgagaggccagctggaggagtgcagaggcagatgggccctgagactgtgcctggaggagagagactggctgcccggcaagaccctgttcgagaacctgtgggccagcgtgtacggcagcagaaagaccctgttcgtgctggcccacaccgacagagtgagcggcctgctgagagccagcttcctgctggcccagcagagactgctggaggacagaaaggacgtggtggtgctggtgatcctgagccccgacggcagaagaagcagatacgtgagactgagacagagactgtgcagacagagcgtgctgctgtggccccaccagcccagcggccagagaagcttctgggcccagctgggcatggccctgaccagagacaaccaccacttctacaacagaaacttctgccagggccccaccgccgagtga

SEQ ID NO: 9822 - RNA, 3099 nt, synthetic construct
  misc_feature 1..3099: note = derived and/or modified sequence opt5 fromTLR9__Homo_sapiens__AAZ95519
  source 1..3099: mol_type = other RNA
atgggcttctgcagaagcgccctgcaccccctctccctgcttgtgcaggctatcatgctggccatgaccctcgcgctggggacacttcctgcttttctgccgtgtgagctccaaccccatggactggtcaactgcaattggctgttcctcaagtctgttcctcactttagcatggccgctccccggggcaacgtgacgtccctgtctcttagctccaatcgcattcatcatctgcacgactctgatttcgctcacctccctagcctgagacaccttaacctgaaatggaattgtccccctgtggggctctccccgatgcattttccctgccacatgaccatcgaacctagcacattcctggccgtccccaccctggaggaactcaacctgtcttacaataacattatgacagtgcctgctctgcccaagtccctgatcagcctctctctgtcccataccaatattcttatgctggacagcgcctctctcgcgggactgcacgccctgcggtttctcttcatggatggcaactgttattacaaaaatccgtgccgccaggctctggaggttgcccctggggcccttctgggactcggcaacctgacacacctttccctgaagtataataacctcaccgtggtccccagaaatctgcctagctccctggaatacctcctgctttcttataaccggatcgtgaaactggcccccgaggacctcgcgaacctgacggccctgcgcgttcttgatgtgggcgggaattgtagacggtgcgaccatgctcccaacccttgtatggagtgcccgcgccactttccccagctccatcctgataccttcagccacctgtccagactggaaggactcgtcctgaaggacagctctctttcctggctgaatgccagctggtttcggggcctcgggaaccttcaggtgctggatctttctgagaatttcctctacaagtgtatcacaaaaaccaaggcttttcaaggactgacacagctgcgcaaactcaacctgagcttcaattatcagaagagagtgtccttcgcccatctttctctggcccccagctttggctccctcgtcgctctgaaagaactggacatgcacgggattttctttcggagccttgatgagaccacgctccgccctctggcgagactgcccatgctccagacactgcggcttcaaatgaacttcatcaatcaggcccagctgggaatttttagagctttcccgggcctccgctacgttgacctgtctgataaccggatctccggcgccagcgagctgaccgccacaatgggggaagctgacggaggcgagaaggtgtggcttcagcctggggacctcgcccccgcgcctgtggataccccctcttccgaagactttagacctaattgcagcaccctgaacttcacactggatctctcccgcaataacctggtcacggtgcaacccgagatgtttgctcagctttctcatctgcagtgcctccggctgagccacaattgtatttcccaagccgttaacggatctcagttcctgccgcttaccggcctccaggtgctggacctgagccacaacaagctcgatctgtaccatgaacactcctttacagagcttcctagactggaggccctcgacctgagctataattctcagcccttcgggatgcaaggagtcggccacaacttttccttcgtggctcatctgcgcacccttcggcacctgagcctcgcccataataacatccactctcaggtttcccagcagctgtgcagcacatctctcagagctctggatttcagcggcaatgcccttgggcatatgtgggcggaaggagacctgtacctccactttttccaaggcctgtccgggctgatttggcttgatctgagccagaaccgcctccacaccctgctcccccagacgctgcggaatcttcctaaatctctccaggtgctgagactgcgcgacaactatctggcctttttcaagtggtggtcccttcattttctgccgaaactcgaggtcctggatctcgctggaaatcaactgaaggcccttacaaacggcagcctgcccgctgggacccggctgagacggctcgacgtgtcctgtaattctatcagcttcgtcgcccctggctttttctccaaagcgaaggaactgcgcgagcttaacctgtctgccaatgctctcaaaaccgtggaccacagctggtttggacccctggcctccgctctccagatcctggatgtttctgccaaccctcttcattgcgcctgtggcgctgcgttcatggactttctgctggaagtgcaggccgctgtccccgggctccctagcagagtgaagtgcggatcccccggccagctgcaagggcttagcattttcgcccaggatctgcggctctgtctggacgaggccctctcttgggattgctttgctctgtcccttctggccgttgcgctgggactcggcgtgccgatgctgcaccatctttgtgggtgggacctgtggtactgcttccacctctgtctggcttggctgccttggagaggccgccagagcggacgggatgaggacgccctcccctatgatgccttcgtcgtgtttgacaagacacaatctgctgtggccgattgggtttacaatgaacttagaggccagctggaggaatgccgcgggagatgggcgctgcggctctgcctggaggaacgcgactggcttcctggaaaaaccctgttcgagaacctctgggcttccgtctatggcagcagaaagacactgtttgtgctggcccacacggatcgggtgtctgggctccttcgcgcctccttcctgctggctcagcagagactcctggaggaccggaaagacgtcgtggttcttgtgatcctgagccccgatggacgcagatcccggtacgtccgcctcagacaacggctgtgtagacagagcgtgctgctctggccgcatcagccttctggccagcgcagcttttgggcccaacttgggatggctctgacccgggacaaccaccatttctacaatagaaacttttgccagggccccacagccgaatga

SEQ ID NO: 9823 - protein, 78 aa, synthetic construct
  REGION 1..78: note = TLR9__Homo_sapiens__L0R5D6
MRPCRTLEMVPTRAEKDKSAAAVLRAPAVVQEPRPEGGSVLLEWGVPSKVYPLLVLSRIPISPCSLPELWALAPPWAW

SEQ ID NO: 9824 - RNA, 237 nt, synthetic construct
  misc_feature 1..237: note = TLR9__Homo_sapiens__CCO13834
  source 1..237: mol_type = other RNA
atgaggccctgcagaactctggagatggtgcctacaagggcagaaaaggacaagtcggcagccgctgtcctgagggcaccagctgtggtgcaggagccaagacctgagggtggaagtgtcctcttagaatggggagtgcccagcaaggtgtacccgctactggtgctatccagaattcccatctctccctgctctctgcctgagctctgggccttagctcctccctgggcttggtag

SEQ ID NO: 9825 - RNA, 237 nt, synthetic construct
  misc_feature 1..237: note = derived and/or modified sequence opt1 fromTLR9__Homo_sapiens__CCO13834
  source 1..237: mol_type = other RNA
atgcgcccctgccggaccctggagatggtgcccacccgcgccgagaaggacaagagcgccgcggccgtcctccgggcccccgccgtggtgcaggagccccgccccgagggcgggtccgtcctgctggagtggggcgtgccgagcaaggtgtaccccctcctggtcctgtcccggatccccatcagcccctgctccctcccggagctgtgggccctggcgccgccctgggcctggtga

SEQ ID NO: 9826 - RNA, 237 nt, synthetic construct
  misc_feature 1..237: note = derived and/or modified sequence opt2 fromTLR9__Homo_sapiens__CCO13834
  source 1..237: mol_type = other RNA
atgcgcccctgccgcaccctcgagatggtccccacccgcgccgagaaggacaagtccgccgccgccgtcctccgcgcccccgccgtcgtccaggagccccgccccgagggcggctccgtcctcctcgagtggggcgtcccctccaaggtctaccccctcctcgtcctctcccgcatccccatctccccctgctccctccccgagctctgggccctcgcccccccctgggcctggtga

SEQ ID NO: 9827 - RNA, 237 nt, synthetic construct
  misc_feature 1..237: note = derived and/or modified sequence opt3 fromTLR9__Homo_sapiens__CCO13834
  source 1..237: mol_type = other RNA
atgagaccctgcaggaccctggagatggtgcctacacgggccgaaaaggacaaaagcgctgcagccgtcctccgcgcgccagctgttgtgcaggagccgcgacccgaaggcgggtccgtacttctggagtggggagtgccttctaaggtctacccattgttagtgctgtcacgtatccccattagtccttgtagcctaccagaactctgggccctggcacccccttgggcctggtga

SEQ ID NO: 9828 - RNA, 237 nt, synthetic construct
  misc_feature 1..237: note = derived and/or modified sequence opt4 fromTLR9__Homo_sapiens__CCO13834
  source 1..237: mol_type = other RNA
atgagaccctgcagaaccctggagatggtgcccaccagagccgagaaggacaagagcgccgccgccgtgctgagagcccccgccgtggtgcaggagcccagacccgagggcggcagcgtgctgctggagtggggcgtgcccagcaaggtgtaccccctgctggtgctgagcagaatccccatcagcccctgcagcctgcccgagctgtgggccctggcccccccctgggcctggtga

SEQ ID NO: 9829 - RNA, 237 nt, synthetic construct
  misc_feature 1..237: note = derived and/or modified sequence opt5 fromTLR9__Homo_sapiens__CCO13834
  source 1..237: mol_type = other RNA
atgagaccctgccggaccctggagatggtgcctacacgcgccgaaaaggacaaaagcgctgccgcggtcctcagagctccggccgttgtgcaggagccccggcctgaaggcgggtccgtgctgcttgagtggggagtcccctctaaggtgtaccctctgctcgttctgagccgcatccccatttccccttgttctcttccggaactgtgggccctcgctcccccttgggcctggtga

SEQ ID NO: 9830 - protein, 44 aa, synthetic construct
  REGION 1..44: note = TLR9__Homo_sapiens__L8E8B9
MEGRRSGCSLGTLLRPQWTLPALKTSGPTAAPSTSPWICHGTTW

SEQ ID NO: 9831 - RNA, 135 nt, synthetic construct
  misc_feature 1..135: note = TLR9__Homo_sapiens__CCQ43550
  source 1..135: mol_type = other RNA
atggaggggagaaggtctggctgcagcctggggaccttgctccggccccagtggacactcccagctctgaagacttcaggcccaactgcagcaccctcaacttcaccttggatctgtcacggaacaacctggtga

SEQ ID NO: 9832 - RNA, 135 nt, synthetic construct
  misc_feature 1..135: note = derived and/or modified sequence opt1 fromTLR9__Homo_sapiens__CCQ43550
  source 1..135: mol_type = other RNA
atggagggccgccggagcgggtgctccctgggcaccctcctgcgcccccagtggaccctgccggccctcaagacgagcgggcccaccgccgcgccctccaccagcccctggatctgccacggcaccacgtggtga

SEQ ID NO: 9833 - RNA, 135 nt, synthetic construct
  misc_feature 1..135: note = derived and/or modified sequence opt2 fromTLR9__Homo_sapiens__CCQ43550
  source 1..135: mol_type = other RNA
atggagggccgccgctccggctgctccctcggcaccctcctccgcccccagtggaccctccccgccctcaagacctccggccccaccgccgccccctccacctccccctggatctgccacggcaccacctggtga

SEQ ID NO: 9834 - RNA, 135 nt, synthetic construct
  misc_feature 1..135: note = derived and/or modified sequence opt3 fromTLR9__Homo_sapiens__CCQ43550
  source 1..135: mol_type = other RNA
atggagggcagaaggagcgggtgctccctgggaaccctccttcggccccagtggacactgcctgccttgaagacttctggtccaacggctgcaccgtcaaccagtccctggatctgtcacggcacaacttggtga

SEQ ID NO: 9835 - RNA, 135 nt, synthetic construct
  misc_feature 1..135: note = derived and/or modified sequence opt4 fromTLR9__Homo_sapiens__CCQ43550
  source 1..135: mol_type = other RNA
atggagggcagaagaagcggctgcagcctgggcaccctgctgagaccccagtggaccctgcccgccctgaagaccagcggccccaccgccgcccccagcaccagcccctggatctgccacggcaccacctggtga

SEQ ID NO: 9836 - RNA, 135 nt, synthetic construct
  misc_feature 1..135: note = derived and/or modified sequence opt5 fromTLR9__Homo_sapiens__CCQ43550
  source 1..135: mol_type = other RNA
atggagggcagacggagcgggtgctccctgggaaccctcctgcgcccccagtggacacttcctgccctgaagacgtctggcccgaccgctgcccccagcacatccccttggatctgtcacgggaccacatggtga

SEQ ID NO: 9837 - protein, 1032 aa, synthetic construct
  REGION 1..1032: note = TLR9__Homo_sapiens__Q9NR96
MGFCRSALHPLSLLVQAIMLAMTLALGTLPAFLPCELQPHGLVNCNWLFLKSVPHFSMAAPRGNVTSLSLSSNRIHHLHDSDFAHLPSLRHLNLKWNCPPVGLSPMHFPCHMTIEPSTFLAVPTLEELNLSYNNIMTVPALPKSLISLSLSHTNILMLDSASLAGLHALRFLFMDGNCYYKNPCRQALEVAPGALLGLGNLTHLSLKYNNLTVVPRNLPSSLEYLLLSYNRIVKLAPEDLANLTALRVLDVGGNCRRCDHAPNPCMECPRHFPQLHPDTFSHLSRLEGLVLKDSSLSWLNASWFRGLGNLRVLDLSENFLYKCITKTKAFQGLTQLRKLNLSFNYQKRVSFAHLSLAPSFGSLVALKELDMHGIFFRSLDETTLRPLARLPMLQTLRLQMNFINQAQLGIFRAFPGLRYVDLSDNRISGASELTATMGEADGGEKVWLQPGDLAPAPVDTPSSEDFRPNCSTLNFTLDLSRNNLVTVQPEMFAQLSHLQCLRLSHNCISQAVNGSQFLPLTGLQVLDLSHNKLDLYHEHSFTELPRLEALDLSYNSQPFGMQGVGHNFSFVAHLRTLRHLSLAHNNIHSQVSQQLCSTSLRALDFSGNALGHMWAEGDLYLHFFQGLSGLIWLDLSQNRLHTLLPQTLRNLPKSLQVLRLRDNYLAFFKWWSLHFLPKLEVLDLAGNQLKALTNGSLPAGTRLRRLDVSCNSISFVAPGFFSKAKELRELNLSANALKTVDHSWFGPLASALQILDVSANPLHCACGAAFMDFLLEVQAAVPGLPSRVKCGSPGQLQGLSIFAQDLRLCLDEALSWDCFALSLLAVALGLGVPMLHHLCGWDLWYCFHLCLAWLPWRGRQSGRDEDALPYDAFVVFDKTQSAVADWVYNELRGQLEECRGRWALRLCLEERDWLPGKTLFENLWASVYGSRKTLFVLAHTDRVSGLLRASFLLAQQRLLEDRKDVVVLVILSPDGRRSRYVRLRQRLCRQSVLLWPHQPSGQRSFWAQLGMALTRDNHHFYNRNFCQGPTAE

SEQ ID NO: 9838 - RNA, 3099 nt, synthetic construct
  misc_feature 1..3099: note = TLR9__Homo_sapiens__AAF72189
  source 1..3099: mol_type = other RNA
atgggtttctgccgcagcgccctgcacccgctgtctctcctggtgcaggccatcatgctggccatgaccctggccctgggtaccttgcctgccttcctaccctgtgagctccagccccacggcctggtgaactgcaactggctgttcctgaagtctgtgccccacttctccatggcagcaccccgtggcaatgtcaccagcctttccttgtcctccaaccgcatccaccacctccatgattctgactttgcccacctgcccagcctgcggcatctcaacctcaagtggaactgcccgccggttggcctcagccccatgcacttcccctgccacatgaccatcgagcccagcaccttcttggctgtgcccaccctggaagagctaaacctgagctacaacaacatcatgactgtgcctgcgctgcccaaatccctcatatccctgtccctcagccataccaacatcctgatgctagactctgccagcctcgccggcctgcatgccctgcgcttcctattcatggacggcaactgttattacaagaacccctgcaggcaggcactggaggtggccccgggtgccctccttggcctgggcaacctcacccacctgtcactcaagtacaacaacctcactgtggtgccccgcaacctgccttccagcctggagtatctgctgttgtcctacaaccgcatcgtcaaactggcgcctgaggacctggccaatctgaccgccctgcgtgtgctcgatgtgggcggaaattgccgccgctgcgaccacgctcccaacccctgcatggagtgccctcgtcacttcccccagctacatcccgataccttcagccacctgagccgtcttgaaggcctggtgttgaaggacagttctctctcctggctgaatgccagttggttccgtgggctgggaaacctccgagtgctggacctgagtgagaacttcctctacaaatgcatcactaaaaccaaggccttccagggcctaacacagctgcgcaagcttaacctgtccttcaattaccaaaagagggtgtcctttgcccacctgtctctggccccttccttcgggagcctggtcgccctgaaggagctggacatgcacggcatcttcttccgctcactcgatgagaccacgctccggccactggcccgcctgcccatgctccagactctgcgtctgcagatgaacttcatcaaccaggcccagctcggcatcttcagggccttccctggcctgcgctacgtggacctgtcggacaaccgcatcagcggagcttcggagctgacagccaccatgggggaggcagatggaggggagaaggtctggctgcagcctggggaccttgctccggccccagtggacactcccagctctgaagacttcaggcccaactgcagcaccctcaacttcaccttggatctgtcacggaacaacctggtgaccgtgcagccggagatgtttgcccagctctcgcacctgcagtgcctgcgcctgagccacaactgcatctcgcaggcagtcaatggctcccagttcctgccgctgaccggtctgcaggtgctagacctgtcccacaataagctggacctctaccacgagcactcattcacggagctaccacgactggaggccctggacctcagctacaacagccagccctttggcatgcagggcgtgggccacaacttcagcttcgtggctcacctgcgcaccctgcgccacctcagcctggcccacaacaacatccacagccaagtgtcccagcagctctgcagtacgtcgctgcgggccctggacttcagcggcaatgcactgggccatatgtgggccgagggagacctctatctgcacttcttccaaggcctgagcggtttgatctggctggacttgtcccagaaccgcctgcacaccctcctgccccaaaccctgcgcaacctccccaagagcctacaggtgctgcgtctccgtgacaattacctggccttctttaagtggtggagcctccacttcctgcccaaactggaagtcctcgacctggcaggaaaccagctgaaggccctgaccaatggcagcctgcctgctggcacccggctccggaggctggatgtcagctgcaacagcatcagcttcgtggcccccggcttcttttccaaggccaaggagctgcgagagctcaaccttagcgccaacgccctcaagacagtggaccactcctggtttgggcccctggcgagtgccctgcaaatactagatgtaagcgccaaccctctgcactgcgcctgtggggcggcctttatggacttcctgctggaggtgcaggctgccgtgcccggtctgcccagccgggtgaagtgtggcagtccgggccagctccagggcctcagcatctttgcacaggacctgcgcctctgcctggatgaggccctctcctgggactgtttcgccctctcgctgctggctgtggctctgggcctgggtgtgcccatgctgcatcacctctgtggctgggacctctggtactgcttccacctgtgcctggcctggcttccctggcgggggcggcaaagtgggcgagatgaggatgccctgccctacgatgccttcgtggtcttcgacaaaacgcagagcgcagtggcagactgggtgtacaacgagcttcgggggcagctggaggagtgccgtgggcgctgggcactccgcctgtgcctggaggaacgcgactggctgcctggcaaaaccctctttgagaacctgtgggcctcggtctatggcagccgcaagacgctgtttgtgctggcccacacggaccgggtcagtggtctcttgcgcgccagcttcctgctggcccagcagcgcctgctggaggaccgcaaggacgtcgtggtgctggtgatcctgagccctgacggccgccgctcccgctacgtgcggctgcgccagcgcctctgccgccagagtgtcctcctctggccccaccagcccagtggtcagcgcagcttctgggcccagctgggcatggccctgaccagggacaaccaccacttctataaccggaacttctgccagggacccacggccgaatag

SEQ ID NO: 9839 - RNA, 3099 nt, synthetic construct
  misc_feature 1..3099: note = derived and/or modified sequence opt1 fromTLR9__Homo_sapiens__AAF72189
  source 1..3099: mol_type = other RNA
atgggcttctgccgcagcgccctgcaccccctctccctgctggtgcaggccatcatgctcgcgatgaccctggccctggggaccctcccggccttcctgccctgcgagctgcagccccacggcctcgtcaactgcaactggctgttcctgaagtccgtgccccacttcagcatggccgccccgcgggggaacgtgacgagcctctccctgagctccaaccgcatccaccacctccacgacagcgacttcgcgcacctcccctccctgcggcacctgaacctcaagtggaactgcccgcccgtcggcctgagccccatgcacttcccctgccacatgaccatcgagccctccaccttcctggccgtgcccaccctcgaggagctgaacctgagctacaacaacatcatgacggtgccggccctccccaagtccctgatcagcctgtccctcagccacaccaacatcctgatgctggactccgccagcctcgcggggctgcacgccctgcgcttcctcttcatggacggcaactgctactacaagaacccctgccggcaggccctggaggtcgcccccggcgccctgctcgggctgggcaacctgacccacctctccctgaagtacaacaacctgaccgtggtgccgcgcaacctccccagcagcctggagtacctgctcctgtcctacaaccggatcgtcaagctggcgcccgaggacctcgccaacctgacggccctgcgcgtgctggacgtcgggggcaactgccggcgctgcgaccacgcccccaacccgtgcatggagtgcccccggcacttcccccagctccaccccgacaccttcagccacctgtcccgcctggaggggctcgtgctgaaggacagctccctgagctggctcaacgcctcctggttccggggcctgggcaacctgcgcgtgctcgacctgagcgagaacttcctgtacaagtgcatcaccaagaccaaggcgttccaggggctcacgcagctgcggaagctgaacctctccttcaactaccagaagcgcgtgagcttcgcccacctgtccctggccccgagcttcggctccctcgtcgccctgaaggagctggacatgcacgggatcttcttccggagcctcgacgagaccaccctgcgccccctggcccggctccccatgctgcagaccctgcgcctccagatgaacttcatcaaccaggcgcagctgggcatcttccgggccttccccggcctgcgctacgtggacctctccgacaaccgcatcagcggggcctccgagctgacggccaccatgggcgaggccgacgggggcgagaaggtgtggctgcagccgggggacctcgcgcccgcccccgtcgacaccccgagctccgaggacttccggcccaactgcagcaccctgaacttcacgctggacctcagccgcaacaacctggtgaccgtgcagcccgagatgttcgcccagctgtcccacctccagtgcctgcggctgagccacaactgcatctcccaggccgtcaacggcagccagttcctccccctgaccggcctccaggtgctggacctgtcccacaacaagctggacctctaccacgagcacagcttcaccgagctgccgcgcctggaggcgctcgacctgtcctacaacagccagcccttcgggatgcagggcgtggggcacaacttctccttcgtcgcccacctccggacgctgcgccacctgagcctggcccacaacaacatccactcccaggtgagccagcagctctgctccaccagcctgcgggccctggacttctccggcaacgccctcgggcacatgtgggcggagggcgacctgtacctgcacttcttccagggcctcagcgggctgatctggctggacctctcccagaaccgcctgcacaccctgctcccccagaccctgcggaacctgcccaagagcctccaggtcctgcgcctgcgggacaactacctcgccttcttcaagtggtggagcctgcacttcctgccgaagctcgaggtgctggacctggccggcaaccagctcaaggccctgacgaacgggtccctgcccgccggcacccgcctccggcgcctggacgtgagctgcaactccatcagcttcgtcgcgcccgggttcttctccaaggccaaggagctgcgggagctcaacctgagcgccaacgccctgaagaccgtggaccactcctggttcggccccctcgccagcgcgctgcagatcctggacgtgtccgccaacccgctccactgcgcctgcggcgccgcgttcatggacttcctgctggaggtccaggccgccgtgcccgggctgcccagccgcgtgaagtgcggctcccccgggcagctccagggcctgagcatcttcgcccaggacctgcggctctgcctggacgaggccctgtcctgggactgcttcgcgctcagcctgctggccgtcgccctcggcctgggggtgccgatgctgcaccacctctgcggctgggacctgtggtactgcttccacctgtgcctcgcctggctgccctggcgcgggcggcagtccggccgcgacgaggacgccctgccctacgacgcgttcgtggtcttcgacaagacccagagcgccgtggccgactgggtgtacaacgagctccgcgggcagctggaggagtgccggggccgctgggccctgcggctctgcctggaggagcgcgactggctgcccggcaagacgctgttcgagaacctgtgggcctccgtctacgggagccggaagaccctgttcgtgctcgcgcacaccgaccgcgtgtccggcctgctgcgggccagcttcctcctggcccagcagcgcctgctcgaggaccggaaggacgtcgtggtgctggtcatcctgagcccggacgggcgccggtcccgctacgtgcggctccgccagcggctgtgccgccagagcgtgctgctctggccccaccagccctccggccagcggagcttctgggcccagctggggatggcgctgacccgcgacaaccaccacttctacaaccggaacttctgccagggccccacggccgagtga

SEQ ID NO: 9840 - RNA, 3099 nt, synthetic construct
  misc_feature 1..3099: note = derived and/or modified sequence opt2 fromTLR9__Homo_sapiens__AAF72189
  source 1..3099: mol_type = other RNA
atgggcttctgccgctccgccctccaccccctctccctcctcgtccaggccatcatgctcgccatgaccctcgccctcggcaccctccccgccttcctcccctgcgagctccagccccacggcctcgtcaactgcaactggctcttcctcaagtccgtcccccacttctccatggccgccccccgcggcaacgtcacctccctctccctctcctccaaccgcatccaccacctccacgactccgacttcgcccacctcccctccctccgccacctcaacctcaagtggaactgcccccccgtcggcctctcccccatgcacttcccctgccacatgaccatcgagccctccaccttcctcgccgtccccaccctcgaggagctcaacctctcctacaacaacatcatgaccgtccccgccctccccaagtccctcatctccctctccctctcccacaccaacatcctcatgctcgactccgcctccctcgccggcctccacgccctccgcttcctcttcatggacggcaactgctactacaagaacccctgccgccaggccctcgaggtcgcccccggcgccctcctcggcctcggcaacctcacccacctctccctcaagtacaacaacctcaccgtcgtcccccgcaacctcccctcctccctcgagtacctcctcctctcctacaaccgcatcgtcaagctcgcccccgaggacctcgccaacctcaccgccctccgcgtcctcgacgtcggcggcaactgccgccgctgcgaccacgcccccaacccctgcatggagtgcccccgccacttcccccagctccaccccgacaccttctcccacctctcccgcctcgagggcctcgtcctcaaggactcctccctctcctggctcaacgcctcctggttccgcggcctcggcaacctccgcgtcctcgacctctccgagaacttcctctacaagtgcatcaccaagaccaaggccttccagggcctcacccagctccgcaagctcaacctctccttcaactaccagaagcgcgtctccttcgcccacctctccctcgccccctccttcggctccctcgtcgccctcaaggagctcgacatgcacggcatcttcttccgctccctcgacgagaccaccctccgccccctcgcccgcctccccatgctccagaccctccgcctccagatgaacttcatcaaccaggcccagctcggcatcttccgcgccttccccggcctccgctacgtcgacctctccgacaaccgcatctccggcgcctccgagctcaccgccaccatgggcgaggccgacggcggcgagaaggtctggctccagcccggcgacctcgcccccgcccccgtcgacaccccctcctccgaggacttccgccccaactgctccaccctcaacttcaccctcgacctctcccgcaacaacctcgtcaccgtccagcccgagatgttcgcccagctctcccacctccagtgcctccgcctctcccacaactgcatctcccaggccgtcaacggctcccagttcctccccctcaccggcctccaggtcctcgacctctcccacaacaagctcgacctctaccacgagcactccttcaccgagctcccccgcctcgaggccctcgacctctcctacaactcccagcccttcggcatgcagggcgtcggccacaacttctccttcgtcgcccacctccgcaccctccgccacctctccctcgcccacaacaacatccactcccaggtctcccagcagctctgctccacctccctccgcgccctcgacttctccggcaacgccctcggccacatgtgggccgagggcgacctctacctccacttcttccagggcctctccggcctcatctggctcgacctctcccagaaccgcctccacaccctcctcccccagaccctccgcaacctccccaagtccctccaggtcctccgcctccgcgacaactacctcgccttcttcaagtggtggtccctccacttcctccccaagctcgaggtcctcgacctcgccggcaaccagctcaaggccctcaccaacggctccctccccgccggcacccgcctccgccgcctcgacgtctcctgcaactccatctccttcgtcgcccccggcttcttctccaaggccaaggagctccgcgagctcaacctctccgccaacgccctcaagaccgtcgaccactcctggttcggccccctcgcctccgccctccagatcctcgacgtctccgccaaccccctccactgcgcctgcggcgccgccttcatggacttcctcctcgaggtccaggccgccgtccccggcctcccctcccgcgtcaagtgcggctcccccggccagctccagggcctctccatcttcgcccaggacctccgcctctgcctcgacgaggccctctcctgggactgcttcgccctctccctcctcgccgtcgccctcggcctcggcgtccccatgctccaccacctctgcggctgggacctctggtactgcttccacctctgcctcgcctggctcccctggcgcggccgccagtccggccgcgacgaggacgccctcccctacgacgccttcgtcgtcttcgacaagacccagtccgccgtcgccgactgggtctacaacgagctccgcggccagctcgaggagtgccgcggccgctgggccctccgcctctgcctcgaggagcgcgactggctccccggcaagaccctcttcgagaacctctgggcctccgtctacggctcccgcaagaccctcttcgtcctcgcccacaccgaccgcgtctccggcctcctccgcgcctccttcctcctcgcccagcagcgcctcctcgaggaccgcaaggacgtcgtcgtcctcgtcatcctctcccccgacggccgccgctcccgctacgtccgcctccgccagcgcctctgccgccagtccgtcctcctctggccccaccagccctccggccagcgctccttctgggcccagctcggcatggccctcacccgcgacaaccaccacttctacaaccgcaacttctgccagggccccaccgccgagtga

SEQ ID NO: 9841 - RNA, 3099 nt, synthetic construct
  misc_feature 1..3099: note = derived and/or modified sequence opt3 fromTLR9__Homo_sapiens__AAF72189
  source 1..3099: mol_type = other RNA
atgggcttctgcagaagcgccctgcaccccctctcccttctggtgcaggctatcatgttggcaatgaccttagccctggggacactacctgcgtttctcccatgtgagctgcaaccgcatggacttgtcaactgcaattggctgttcttgaagtctgttccccacttttcaatggctgcccctaggggtaacgtgacgagtctcagcctgtcctctaatcggattcatcaccttcatgactcggatttcgcacacctcccatcattacgccacctgaaccttaaatggaattgtccccctgtaggcttgagcccaatgcattttccctgccacatgactatagaacctagtaccttcctggccgtgccaacactagaggaactcaacctgtcctacaataacatcatgactgtcccggctctgcccaagtctctgattagcttgtccctctcacataccaatatcctgatgttagacagtgcaagcctggccgggctccacgctctgcgatttctgttcatggatggaaactgttattacaaaaatccttgccgtcaggccttggaggtggcgccaggcgcactactgggtctcgggaacctgacacacctttctctgaagtataataacttgaccgttgtgcccagaaatctcccttcctcactggaatacttactgctaagctataacaggattgtcaaactcgccccagaggacctggctaaccttactgccttgcgggtgctggatgtaggaggcaattgtcgcagatgcgaccatgcacccaacccgtgtatggagtgccctaggcactttccccagctccatccagatacattcagtcacctgtctcggcttgaaggcctggttttgaaggactccagcctctcgtggctgaatgcttcttggtttcgcgggttaggaaacctgcgagtgctagatctctccgagaatttcctgtacaagtgtatcaccaaaacgaaggcctttcagggtcttactcaattgagaaaactgaacctctcattcaattatcagaagagggtcagtttcgcgcatctgagcttagccccttcctttggctctctggtggcacttaaagaattggacatgcacgggatattctttcggagcctcgatgagaccacactgcgtcccctagctcgcctgccaatgctccagactctgagacttcagatgaacttcatcaatcaagcccagttgggaatttttagggctttccccggcctgcggtacgtggacttatcagataaccgaatcagtggtgcctccgagctcaccgcaacaatgggggaagccgacggaggcgagaaggtctggctgcagcctggcgaccttgctccagcgccggttgatacccccagctctgaagactttcgccctaattgctcaacgctgaacttcactttggatctcagtagaaataacctggtgacagtacagccagagatgtttgcacaactaagccaccttcagtgcctcaggctgtcccataattgtatttctcaggccgtgaacgggtcgcaattccttcccttgaccggactgcaggtcttagacctcagccacaacaagctggatctttaccatgaacactcctttactgagctgcctcggctagaggctctcgacctgtcatataatagtcagccattcggtatgcagggcgtggggcacaacttttctttcgttgcccatttgcgcacactgagacacttaagcctcgcacataataacatccactcccaagtgtcacagcagctgtgcagcacctctcttagggccctggatttctccggaaatgctttgggccatatgtgggccgaaggtgacctctacctgcactttttccaggggctaagtggcctgatatggcttgatctcagccaaaaccgtctgcacacgttgctgccccagaccttacggaatctcccgaaatctctgcaggtccttcgactgagagacaactatttggcatttttcaagtggtggtccctccattttctgcctaaactagaggtgctggatcttgcgggaaatcagctcaaggctctgacaaacggctcattgccagccgggactaggttacgccggctggacgtaagttgtaatagcatttcgttcgttgcacccggatttttctccaaagccaaggaactcagagagctgaacctttctgctaatgccctgaaaaccgtggaccacagctggtttggtcctttggcatcagctctacaaatcctggatgtcagtgccaaccccctccattgcgcgtgtggcgccgctttcatggactttctgcttgaagtgcaggcagccgtcccagggttaccttccagggtgaagtgcggatctcccggccagctgcagggtctcagcattttcgctcaagatttgcgcctgtgtctcgacgaggccctgtcctgggattgctttgcactttcactgttggcggttgccctagggctgggcgtgccaatgctccaccatttatgtggatgggacctgtggtactgcttccacctttgtctggcttggctcccgtggcgaggccggcagagcgggcgtgatgaggacgccttgccttatgatgcattcgtagtctttgacaagacacagagtgctgtggccgattgggtttacaatgaactgagaggacaactcgaggaatgcaggggtcgctgggcactgcggctttgcctagaggaaagagactggctgcccggcaaaactttgttcgagaacttatgggcctctgtgtatgggtccaggaagaccctgtttgtcctcgctcacacagatcgagtgagcggactgcttcgcgcgtcgttcctgctcgcccagcagcggttgctggaggacagaaaagacgtagtggttctagtcatcctgtcaccagatggcaggcgttctcgctacgtgcggctcagacagaggctttgtcgacaaagtgtgctgttatggccccatcagccttccggtcagcggagcttttgggcacagttggggatggctctgacccgcgacaaccaccatttctacaatagaaacttttgccaaggcccaactgccgaatga

SEQ ID NO: 9842 - RNA, 3099 nt, synthetic construct
  misc_feature 1..3099: note = derived and/or modified sequence opt4 fromTLR9__Homo_sapiens__AAF72189
  source 1..3099: mol_type = other RNA
atgggcttctgcagaagcgccctgcaccccctgagcctgctggtgcaggccatcatgctggccatgaccctggccctgggcaccctgcccgccttcctgccctgcgagctgcagccccacggcctggtgaactgcaactggctgttcctgaagagcgtgccccacttcagcatggccgcccccagaggcaacgtgaccagcctgagcctgagcagcaacagaatccaccacctgcacgacagcgacttcgcccacctgcccagcctgagacacctgaacctgaagtggaactgcccccccgtgggcctgagccccatgcacttcccctgccacatgaccatcgagcccagcaccttcctggccgtgcccaccctggaggagctgaacctgagctacaacaacatcatgaccgtgcccgccctgcccaagagcctgatcagcctgagcctgagccacaccaacatcctgatgctggacagcgccagcctggccggcctgcacgccctgagattcctgttcatggacggcaactgctactacaagaacccctgcagacaggccctggaggtggcccccggcgccctgctgggcctgggcaacctgacccacctgagcctgaagtacaacaacctgaccgtggtgcccagaaacctgcccagcagcctggagtacctgctgctgagctacaacagaatcgtgaagctggcccccgaggacctggccaacctgaccgccctgagagtgctggacgtgggcggcaactgcagaagatgcgaccacgcccccaacccctgcatggagtgccccagacacttcccccagctgcaccccgacaccttcagccacctgagcagactggagggcctggtgctgaaggacagcagcctgagctggctgaacgccagctggttcagaggcctgggcaacctgagagtgctggacctgagcgagaacttcctgtacaagtgcatcaccaagaccaaggccttccagggcctgacccagctgagaaagctgaacctgagcttcaactaccagaagagagtgagcttcgcccacctgagcctggcccccagcttcggcagcctggtggccctgaaggagctggacatgcacggcatcttcttcagaagcctggacgagaccaccctgagacccctggccagactgcccatgctgcagaccctgagactgcagatgaacttcatcaaccaggcccagctgggcatcttcagagccttccccggcctgagatacgtggacctgagcgacaacagaatcagcggcgccagcgagctgaccgccaccatgggcgaggccgacggcggcgagaaggtgtggctgcagcccggcgacctggcccccgcccccgtggacacccccagcagcgaggacttcagacccaactgcagcaccctgaacttcaccctggacctgagcagaaacaacctggtgaccgtgcagcccgagatgttcgcccagctgagccacctgcagtgcctgagactgagccacaactgcatcagccaggccgtgaacggcagccagttcctgcccctgaccggcctgcaggtgctggacctgagccacaacaagctggacctgtaccacgagcacagcttcaccgagctgcccagactggaggccctggacctgagctacaacagccagcccttcggcatgcagggcgtgggccacaacttcagcttcgtggcccacctgagaaccctgagacacctgagcctggcccacaacaacatccacagccaggtgagccagcagctgtgcagcaccagcctgagagccctggacttcagcggcaacgccctgggccacatgtgggccgagggcgacctgtacctgcacttcttccagggcctgagcggcctgatctggctggacctgagccagaacagactgcacaccctgctgccccagaccctgagaaacctgcccaagagcctgcaggtgctgagactgagagacaactacctggccttcttcaagtggtggagcctgcacttcctgcccaagctggaggtgctggacctggccggcaaccagctgaaggccctgaccaacggcagcctgcccgccggcaccagactgagaagactggacgtgagctgcaacagcatcagcttcgtggcccccggcttcttcagcaaggccaaggagctgagagagctgaacctgagcgccaacgccctgaagaccgtggaccacagctggttcggccccctggccagcgccctgcagatcctggacgtgagcgccaaccccctgcactgcgcctgcggcgccgccttcatggacttcctgctggaggtgcaggccgccgtgcccggcctgcccagcagagtgaagtgcggcagccccggccagctgcagggcctgagcatcttcgcccaggacctgagactgtgcctggacgaggccctgagctgggactgcttcgccctgagcctgctggccgtggccctgggcctgggcgtgcccatgctgcaccacctgtgcggctgggacctgtggtactgcttccacctgtgcctggcctggctgccctggagaggcagacagagcggcagagacgaggacgccctgccctacgacgccttcgtggtgttcgacaagacccagagcgccgtggccgactgggtgtacaacgagctgagaggccagctggaggagtgcagaggcagatgggccctgagactgtgcctggaggagagagactggctgcccggcaagaccctgttcgagaacctgtgggccagcgtgtacggcagcagaaagaccctgttcgtgctggcccacaccgacagagtgagcggcctgctgagagccagcttcctgctggcccagcagagactgctggaggacagaaaggacgtggtggtgctggtgatcctgagccccgacggcagaagaagcagatacgtgagactgagacagagactgtgcagacagagcgtgctgctgtggccccaccagcccagcggccagagaagcttctgggcccagctgggcatggccctgaccagagacaaccaccacttctacaacagaaacttctgccagggccccaccgccgagtga

SEQ ID NO: 9843 - RNA, 3099 nt, synthetic construct
  misc_feature 1..3099: note = derived and/or modified sequence opt5 fromTLR9__Homo_sapiens__AAF72189
  source 1..3099: mol_type = other RNA
atgggcttctgcagaagcgccctgcaccccctctccctgcttgtgcaggctatcatgctggccatgaccctcgcgctggggacacttcctgcttttctgccgtgtgagctccaaccccatggactggtcaactgcaattggctgttcctcaagtctgttcctcactttagcatggccgctccccggggcaacgtgacgtccctgtctcttagctccaatcgcattcatcatctgcacgactctgatttcgctcacctccctagcctgagacaccttaacctgaaatggaattgtccccctgtggggctctccccgatgcattttccctgccacatgaccatcgaacctagcacattcctggccgtccccaccctggaggaactcaacctgtcttacaataacattatgacagtgcctgctctgcccaagtccctgatcagcctctctctgtcccataccaatattcttatgctggacagcgcctctctcgcgggactgcacgccctgcggtttctcttcatggatggcaactgttattacaaaaatccgtgccgccaggctctggaggttgcccctggggcccttctgggactcggcaacctgacacacctttccctgaagtataataacctcaccgtggtccccagaaatctgcctagctccctggaatacctcctgctttcttataaccggatcgtgaaactggcccccgaggacctcgcgaacctgacggccctgcgcgttcttgatgtgggcgggaattgtagacggtgcgaccatgctcccaacccttgtatggagtgcccgcgccactttccccagctccatcctgataccttcagccacctgtccagactggaaggactcgtcctgaaggacagctctctttcctggctgaatgccagctggtttcggggcctcgggaacctgcgcgtgctggatctttctgagaatttcctctacaagtgtatcacaaaaaccaaggcttttcagggactgacacaactgagaaaactcaacctgagcttcaattatcagaagcgggtgtccttcgcccatctttctctggcccccagctttggctccctcgtcgctctgaaagaactggacatgcacgggattttctttcgcagccttgatgagaccacgctcagacctctggcgcggctgcccatgctccagacactgagacttcagatgaacttcatcaatcaagcccagctgggaatttttcgcgctttcccgggcctccggtacgttgacctgtctgataacagaatctccggcgccagcgagctgaccgccacaatgggggaagctgacggaggcgagaaggtgtggcttcagcctggggacctcgcccccgcgcctgtggataccccctcttccgaagactttcgccctaattgcagcaccctgaacttcacactggatctctcccggaataacctggtcacggtgcagcccgagatgtttgctcaactttctcatctgcagtgcctcagactgagccacaattgtatttcccaggccgttaacggatctcaattcctgccgcttaccggccttcaggtgctcgacctgagccacaacaagctcgatctgtaccatgaacactcctttacagagcttcctcgcctggaggccctcgacctgagctataattctcagcccttcgggatgcagggagtcggccacaacttttccttcgtggctcatctgcggacccttagacacctgagcctcgcccataataacatccactctcaagtttcccagcagctgtgcagcacatctctccgcgctctggatttcagcggcaatgcccttgggcatatgtgggcggaaggagacctgtacctccactttttccagggcctgtccgggctgatttggcttgatctgagccaaaaccggctccacaccctgctcccccagacgctgagaaatcttcctaaatctctccaggtgctgcgcctgcgggacaactatctggcctttttcaagtggtggtcccttcattttctgccgaaactcgaggtcctggatctcgctggaaatcagctgaaggcccttacaaacggcagcctgcccgctgggaccagactgcggcgcctcgacgtgtcctgtaattctatcagcttcgtcgcccctggctttttctccaaagcgaaggaactgagagagcttaacctgtctgccaatgctctcaaaaccgtggaccacagctggtttggacccctggcctccgctctccaaatcctggatgtttctgccaaccctcttcattgcgcctgtggcgctgcgttcatggactttctgctggaagtgcaggccgctgtccccgggctccctagccgggtgaagtgcggatcccccggccagctgcaggggcttagcattttcgcccaagatctgagactctgtctggacgaggccctctcttgggattgctttgctctgtcccttctggccgttgcgctgggactcggcgtgccgatgctgcaccatctttgtgggtgggacctgtggtactgcttccacctctgtctggcttggctgccttggcgcggccggcagagcggaagagatgaggacgccctcccctatgatgccttcgtcgtgtttgacaagacacagtctgctgtggccgattgggtttacaatgaacttcgcggccaactggaggaatgcagagggcggtgggcgctgcgcctctgcctggaggaaagagactggcttcctggaaaaaccctgttcgagaacctctgggcttccgtctatggcagccggaagacactgtttgtgctggcccacacggatcgcgtgtctgggctccttagagcctccttcctgctggctcagcagcggctcctggaggaccgcaaagacgtcgtggttcttgtgatcctgagccccgatggaagacggtcccgctacgtcagactccggcagagactgtgtcgccaaagcgtgctgctctggccgcatcagccttctggccagcggagcttttgggcccagcttgggatggctctgaccagagacaaccaccatttctacaatcgcaacttttgccaaggccccacagccgaatga

SEQ ID NO: 9844 - protein, 522 aa, synthetic construct
  REGION 1..522: note = TRAF6__Homo_sapiens__Q9Y4K3
MSLLNCENSCGSSQSESDCCVAMASSCSAVTKDDSVGGTASTGNLSSSFMEEIQGYDVEFDPPLESKYECPICLMALREAVQTPCGHRFCKACIIKSIRDAGHKCPVDNEILLENQLFPDNFAKREILSLMVKCPNEGCLHKMELRHLEDHQAHCEFALMDCPQCQRPFQKFHINIHILKDCPRRQVSCDNCAASMAFEDKEIHDQNCPLANVICEYCNTILIREQMPNHYDLDCPTAPIPCTFSTFGCHEKMQRNHLARHLQENTQSHMRMLAQAVHSLSVIPDSGYISEVRNFQETIHQLEGRLVRQDHQIRELTAKMETQSMYVSELKRTIRTLEDKVAEIEAQQCNGIYIWKIGNFGMHLKCQEEEKPVVIHSPGFYTGKPGYKLCMRLHLQLPTAQRCANYISLFVHTMQGEYDSHLPWPFQGTIRLTILDQSEAPVRQNHEEIMDAKPELLAFQRPTIPRNPKGFGYVTFMHLEALRQRTFIKDDTLLVRCEVSTRFDMGSLRREGFQPRSTDAGV

SEQ ID NO: 9845 - RNA, 1569 nt, synthetic construct
  misc_feature 1..1569: note = TRAF6__Homo_sapiens__AAB38751
  source 1..1569: mol_type = other RNA
atgagtctgctaaactgtgaaaacagctgtggatccagccagtctgaaagtgactgctgtgtggccatggccagctcctgtagcgctgtaacaaaagatgatagtgtgggtggaactgccagcacggggaacctctccagctcatttatggaggagatccagggatatgatgtagagtttgacccacccctggaaagcaagtatgaatgccccatctgcttgatggcattacgagaagcagtgcaaacgccatgcggccataggttctgcaaagcctgcatcataaaatcaataagggatgcaggtcacaaatgtccagttgacaatgaaatactgctggaaaatcaactatttccagacaattttgcaaaacgtgagattctttctctgatggtgaaatgtccaaatgaaggttgtttgcacaagatggaactgagacatcttgaggatcatcaagcacattgtgagtttgctcttatggattgtccccaatgccagcgtcccttccaaaaattccatattaatattcacattctgaaggattgtccaaggagacaggtttcttgtgacaactgtgctgcatcaatggcatttgaagataaagagatccatgaccagaactgtcctttggcaaatgtcatctgtgaatactgcaatactatactcatcagagaacagatgcctaatcattatgatctagactgccctacagccccaattccatgcacattcagtacttttggttgccatgaaaagatgcagaggaatcacttggcacgccacctacaagagaacacccagtcacacatgagaatgttggcccaggctgttcatagtttgagcgttatacccgactctgggtatatctcagaggtccggaatttccaggaaactattcaccagttagagggtcgccttgtaagacaagaccatcaaatccgggagctgactgctaaaatggaaactcagagtatgtatgtaagtgagctcaaacgaaccattcgaacccttgaggacaaagttgctgaaatcgaagcacagcagtgcaatggaatttatatttggaagattggcaactttggaatgcatttgaaatgtcaagaagaggagaaacctgttgtgattcatagccctggattctacactggcaaacccgggtacaaactgtgcatgcgcttgcaccttcagttaccgactgctcagcgctgtgcaaactatatatccctttttgtccacacaatgcaaggagaatatgacagccacctcccttggcccttccagggtacaatacgccttacaattcttgatcagtctgaagcacctgtaaggcaaaaccacgaagagataatggatgccaaaccagagctgcttgctttccagcgacccacaatcccacggaacccaaaaggttttggctatgtaacttttatgcatctggaagccctaagacaaagaactttcattaaggatgacacattattagtgcgctgtgaggtctccacccgctttgacatgggtagccttcggagggagggttttcagccacgaagtactgatgcaggggtatag

SEQ ID NO: 9846 - RNA, 1569 nt, synthetic construct
  misc_feature 1..1569: note = derived and/or modified sequence opt1 fromTRAF6__Homo_sapiens__AAB38751
  source 1..1569: mol_type = other RNA
atgagcctgctcaactgcgagaactcctgcggcagctcccagagcgagtccgactgctgcgtggccatggccagctcctgcagcgcggtcaccaaggacgactccgtcgggggcaccgccagcacggggaacctgtccagctccttcatggaggagatccagggctacgacgtggagttcgacccgcccctggagagcaagtacgagtgccccatctgcctcatggccctgcgcgaggccgtgcagaccccctgcgggcaccggttctgcaaggcctgcatcatcaagtccatccgcgacgcgggccacaagtgccccgtggacaacgagatcctgctcgagaaccagctgttcccggacaacttcgccaagcgggagatcctgagcctcatggtgaagtgccccaacgagggctgcctgcacaagatggagctgcgccacctcgaggaccaccaggcccactgcgagttcgccctgatggactgcccccagtgccagcggcccttccagaagttccacatcaacatccacatcctgaaggactgcccgcgccggcaggtctcctgcgacaactgcgcggccagcatggccttcgaggacaaggagatccacgaccagaactgccccctcgccaacgtgatctgcgagtactgcaacaccatcctgatccgcgagcagatgcccaaccactacgacctggactgccccaccgccccgatcccctgcacgttctccaccttcgggtgccacgagaagatgcagcggaaccacctcgcgcgccacctccaggagaacacccagagccacatgcggatgctggcccaggccgtgcacagcctgtccgtcatccccgacagcggctacatctccgaggtgcgcaacttccaggagaccatccaccagctggaggggcggctggtgcgccaggaccaccagatccgggagctcacggccaagatggagacccagagcatgtacgtctccgagctgaagcgcaccatccggaccctggaggacaaggtggccgagatcgaggcgcagcagtgcaacggcatctacatctggaagatcgggaacttcggcatgcacctcaagtgccaggaggaggagaagcccgtggtcatccacagcccgggcttctacacggggaagcccggctacaagctgtgcatgcgcctgcacctccagctgcccaccgcccagcggtgcgccaactacatctccctgttcgtgcacaccatgcagggggagtacgacagccacctcccctggccgttccagggcaccatccgcctgacgatcctggaccagtccgaggcccccgtgcggcagaaccacgaggagatcatggacgccaagcccgagctcctggcgttccagcgccccaccatcccgcgcaaccccaagggcttcgggtacgtcaccttcatgcacctggaggccctccggcagcgcaccttcatcaaggacgacacgctgctggtgcggtgcgaggtgagcacccgcttcgacatgggctccctccggcgcgaggggttccagccccggagcaccgacgccggcgtctga

SEQ ID NO: 9847 - RNA, 1569 nt, synthetic construct
  misc_feature 1..1569: note = derived and/or modified sequence opt2 fromTRAF6__Homo_sapiens__AAB38751
  source 1..1569: mol_type = other RNA
atgtccctcctcaactgcgagaactcctgcggctcctcccagtccgagtccgactgctgcgtcgccatggcctcctcctgctccgccgtcaccaaggacgactccgtcggcggcaccgcctccaccggcaacctctcctcctccttcatggaggagatccagggctacgacgtcgagttcgacccccccctcgagtccaagtacgagtgccccatctgcctcatggccctccgcgaggccgtccagaccccctgcggccaccgcttctgcaaggcctgcatcatcaagtccatccgcgacgccggccacaagtgccccgtcgacaacgagatcctcctcgagaaccagctcttccccgacaacttcgccaagcgcgagatcctctccctcatggtcaagtgccccaacgagggctgcctccacaagatggagctccgccacctcgaggaccaccaggcccactgcgagttcgccctcatggactgcccccagtgccagcgccccttccagaagttccacatcaacatccacatcctcaaggactgcccccgccgccaggtctcctgcgacaactgcgccgcctccatggccttcgaggacaaggagatccacgaccagaactgccccctcgccaacgtcatctgcgagtactgcaacaccatcctcatccgcgagcagatgcccaaccactacgacctcgactgccccaccgcccccatcccctgcaccttctccaccttcggctgccacgagaagatgcagcgcaaccacctcgcccgccacctccaggagaacacccagtcccacatgcgcatgctcgcccaggccgtccactccctctccgtcatccccgactccggctacatctccgaggtccgcaacttccaggagaccatccaccagctcgagggccgcctcgtccgccaggaccaccagatccgcgagctcaccgccaagatggagacccagtccatgtacgtctccgagctcaagcgcaccatccgcaccctcgaggacaaggtcgccgagatcgaggcccagcagtgcaacggcatctacatctggaagatcggcaacttcggcatgcacctcaagtgccaggaggaggagaagcccgtcgtcatccactcccccggcttctacaccggcaagcccggctacaagctctgcatgcgcctccacctccagctccccaccgcccagcgctgcgccaactacatctccctcttcgtccacaccatgcagggcgagtacgactcccacctcccctggcccttccagggcaccatccgcctcaccatcctcgaccagtccgaggcccccgtccgccagaaccacgaggagatcatggacgccaagcccgagctcctcgccttccagcgccccaccatcccccgcaaccccaagggcttcggctacgtcaccttcatgcacctcgaggccctccgccagcgcaccttcatcaaggacgacaccctcctcgtccgctgcgaggtctccacccgcttcgacatgggctccctccgccgcgagggcttccagccccgctccaccgacgccggcgtctga

SEQ ID NO: 9848 - RNA, 1569 nt, synthetic construct
  misc_feature 1..1569: note = derived and/or modified sequence opt3 fromTRAF6__Homo_sapiens__AAB38751
  source 1..1569: mol_type = other RNA
atgagcctgctcaactgcgaaaattcctgtgggtcttcacagagtgagagcgactgctgtgtggccatggcttcctcttgctcggcagtcaccaaggatgactcagttggcggaacagccagcactggtaaccttagttcctctttcatggaggaaatccaaggctacgatgtggagtttgatccccctctggaaagcaaatatgagtgtccaatttgcttgatggcgttaagagaggctgtacagacgccgtgtgggcacaggttctgcaaggcctgtataatcaaatccattcgggacgcaggacataagtgccccgtggacaatgaaatcctgctagagaaccagctctttcctgataatttcgccaaacgcgaaattctgtcacttatggtcaagtgtccaaacgagggctgcctgcacaagatggagttgcgacatctcgaagaccaccaggctcattgcgagtttgcactgatggattgtccccaatgccagcgtcctttccagaaatttcacatcaatatacacatcctgaaggactgtccaagacgccaggtgagttgcgataactgtgccgctagcatggccttcgaagacaaagagattcatgatcaaaattgccccctcgcgaacgttatctgtgaatactgcaataccattttaatccgggagcagatgcctaaccactatgacctggactgtccaacagcaccgataccctgcactttttctaccttcggttgtcatgagaagatgcagcgcaatcaccttgccagacacttgcaggaaaacacacaatcccatatgaggatgctggctcaggccgtgcactcactaagcgtcattcctgatagtgggtacatctctgaggtgcggaattttcaggaaaccattcatcaactcgagggacgcctggtacgacaggaccaccagatcagagaacttactgcaaaaatggagacacagtccatgtatgttagcgagctgaagaggaccatccggacgttggaagataaggtggctgagattgaagcccaacagtgcaacggcatatacatctggaaaattggcaacttcgggatgcatctcaagtgccaggaggaagagaaaccagtcgtgatccactcgcccggattttatactggtaagcctggctacaaactgtgtatgcgtttacatctgcagctcccaaccgcgcaacgctgcgccaattacatatctcttttcgtgcacacaatgcagggggagtatgactcccatctgccctggccgttccagggaactattagattgaccatcctagatcagtcagaagcacctgtcaggcaaaaccacgaggaaatcatggacgctaagcccgagctgctcgcctttcagcggccaacaattcctcgaaatcccaaaggcttcggttacgttacctttatgcacctggaggctcttaggcagagaacgttcatcaaggatgacactctgttggtgaggtgtgaagtaagtacacggtttgatatggggagcctccgcagagagggattccagccaaggtccaccgacgccggcgtgtga

SEQ ID NO: 9849 - RNA, 1569 nt, synthetic construct
  misc_feature 1..1569: note = derived and/or modified sequence opt4 fromTRAF6__Homo_sapiens__AAB38751
  source 1..1569: mol_type = other RNA
atgagcctgctgaactgcgagaacagctgcggcagcagccagagcgagagcgactgctgcgtggccatggccagcagctgcagcgccgtgaccaaggacgacagcgtgggcggcaccgccagcaccggcaacctgagcagcagcttcatggaggagatccagggctacgacgtggagttcgacccccccctggagagcaagtacgagtgccccatctgcctgatggccctgagagaggccgtgcagaccccctgcggccacagattctgcaaggcctgcatcatcaagagcatcagagacgccggccacaagtgccccgtggacaacgagatcctgctggagaaccagctgttccccgacaacttcgccaagagagagatcctgagcctgatggtgaagtgccccaacgagggctgcctgcacaagatggagctgagacacctggaggaccaccaggcccactgcgagttcgccctgatggactgcccccagtgccagagacccttccagaagttccacatcaacatccacatcctgaaggactgccccagaagacaggtgagctgcgacaactgcgccgccagcatggccttcgaggacaaggagatccacgaccagaactgccccctggccaacgtgatctgcgagtactgcaacaccatcctgatcagagagcagatgcccaaccactacgacctggactgccccaccgcccccatcccctgcaccttcagcaccttcggctgccacgagaagatgcagagaaaccacctggccagacacctgcaggagaacacccagagccacatgagaatgctggcccaggccgtgcacagcctgagcgtgatccccgacagcggctacatcagcgaggtgagaaacttccaggagaccatccaccagctggagggcagactggtgagacaggaccaccagatcagagagctgaccgccaagatggagacccagagcatgtacgtgagcgagctgaagagaaccatcagaaccctggaggacaaggtggccgagatcgaggcccagcagtgcaacggcatctacatctggaagatcggcaacttcggcatgcacctgaagtgccaggaggaggagaagcccgtggtgatccacagccccggcttctacaccggcaagcccggctacaagctgtgcatgagactgcacctgcagctgcccaccgcccagagatgcgccaactacatcagcctgttcgtgcacaccatgcagggcgagtacgacagccacctgccctggcccttccagggcaccatcagactgaccatcctggaccagagcgaggcccccgtgagacagaaccacgaggagatcatggacgccaagcccgagctgctggccttccagagacccaccatccccagaaaccccaagggcttcggctacgtgaccttcatgcacctggaggccctgagacagagaaccttcatcaaggacgacaccctgctggtgagatgcgaggtgagcaccagattcgacatgggcagcctgagaagagagggcttccagcccagaagcaccgacgccggcgtgtga

SEQ ID NO: 9850 - RNA, 1569 nt, synthetic construct
  misc_feature 1..1569: note = derived and/or modified sequence opt5 fromTRAF6__Homo_sapiens__AAB38751
  source 1..1569: mol_type = other RNA
atgagcctgctcaactgcgagaatagctgtggctctagccagtccgaatctgactgctgtgtggccatggctagctcctgctctgccgtcaccaaggatgacagcgttgggggaacagcgtccacgggcaacctgtcctcttccttcatggaggaaatccaagggtacgatgtggagtttgatccccctcttgaaagcaaatatgagtgtccgatttgcctgatggctctcagagaggccgtgcagaccccctgtggacaccggttctgcaaggcctgtatcattaaatctatccgcgacgctggccataagtgccctgtcgacaatgaaattctgcttgagaaccagctgtttcccgataatttcgccaaaagagaaatcctctccctgatggtgaagtgtcctaacgaggggtgcctgcacaagatggagctccggcatctggaagaccaccaggctcattgcgagtttgcccttatggattgtccccaatgccagcgccctttccagaaatttcacatcaatattcacatcctgaaggactgtccgagacggcaggttagctgcgataactgtgcggcctctatggctttcgaagacaaagagattcatgatcaaaattgccccctcgccaacgtgatctgtgaatactgcaatacaattctgatccgcgagcagatgcctaaccactatgaccttgactgtcccaccgctcctattccctgcacattttccaccttcggatgtcatgagaagatgcagagaaatcacctggcccggcacctccaggaaaacacacaaagccatatgcgcatgctggcgcaggccgtccactccctgtctgtgatcccggatagcggctacatctccgaggttagaaattttcaggaaaccattcatcaactcgagggccggctggtgcgccaggaccaccagatcagagaacttacggctaaaatggagacccagagcatgtatgtctctgagctgaagcggacaattcgcaccctcgaagataaggtggccgagatcgaagctcaacagtgcaacgggatttacatctggaaaatcggaaacttcggcatgcatctgaagtgccaggaggaagagaaacctgtggtcattcactcccccgggttttatacaggaaagcctggctacaaactttgtatgagactgcacctccagctgcccaccgcccaacggtgcgccaattacatcagcctgttcgttcatacgatgcagggggagtatgactctcacctcccctggcctttccagggaacaattagactgaccatccttgatcagagcgaagctccggtgcgccaaaaccatgaggaaattatggacgcgaagcccgagctgctcgcctttcagcggcctacaatccccagaaatcctaaaggcttcggctacgtgacctttatgcacctggaggcccttcgccagcggaccttcatcaaggatgacacactgctcgtcagatgtgaagtgtccacgcgctttgatatggggtctctgcggagagagggattccagccccgcagcaccgacgctggcgtttga

SEQ ID NO: 9851 - protein, 257 aa, synthetic construct
  REGION 1..257: note = c-myc__Homo_sapiens__A0A0B4J1R1
MPLNVSFTNRNYDLDYDSVQPYFYCDEEENFYQQQQQSELQPPAPSEDIWKKFELLPTPPLSPSRRSGLCSPSYVAVTPFSLRGDNDGGGGSFSTADQLEMVTELLGGDMVNQSFICDPDDETFIKNIIIQDCMWSGFSAAAKLVSEKLASYQAARKDSGSPNPARGHSVCSTSSLYLQDLSAAASECIDPSVVFPYPLNDSSSPKSCASQDSSAFSPSSDSLLSSTESSPQGSPEPLVLHEETPPTTSSDSGGTRR

SEQ ID NO: 9852 - RNA, 774 nt, synthetic construct
  misc_feature 1..774: note = c-myc__Homo_sapiens__EAW92099
  source 1..774: mol_type = other RNA
atgcccctcaacgttagcttcaccaacaggaactatgacctcgactacgactcggtgcagccgtatttctactgcgacgaggaggagaacttctaccagcagcagcagcagagcgagctgcagcccccggcgcccagcgaggatatctggaagaaattcgagctgctgcccaccccgcccctgtcccctagccgccgctccgggctctgctcgccctcctacgttgcggtcacacccttctcccttcggggagacaacgacggcggtggcgggagcttctccacggccgaccagctggagatggtgaccgagctgctgggaggagacatggtgaaccagagtttcatctgcgacccggacgacgagaccttcatcaaaaacatcatcatccaggactgtatgtggagcggcttctcggccgccgccaagctcgtctcagagaagctggcctcctaccaggctgcgcgcaaagacagcggcagcccgaaccccgcccgcggccacagcgtctgctccacctccagcttgtacctgcaggatctgagcgccgccgcctcagagtgcatcgacccctcggtggtcttcccctaccctctcaacgacagcagctcgcccaagtcctgcgcctcgcaagactccagcgccttctctccgtcctcggattctctgctctcctcgacggagtcctccccgcagggcagccccgagcccctggtgctccatgaggagacaccgcccaccaccagcagcgactctggaggaacaagaagatga

SEQ ID NO: 9853 - RNA, 774 nt, synthetic construct
  misc_feature 1..774: note = derived and/or modified sequence opt1 fromc-myc__Homo_sapiens__EAW92099
  source 1..774: mol_type = other RNA
atgcccctgaacgtgagcttcaccaaccgcaactacgacctcgactacgactccgtccagccctacttctactgcgacgaggaggagaacttctaccagcagcagcagcagagcgagctgcagccgcccgccccctccgaggacatctggaagaagttcgagctgctcccgaccccgcccctgagcccctcccggcgcagcggcctgtgctcccccagctacgtggccgtgacgcccttctccctccgcggggacaacgacggcgggggcgggagcttctccaccgcggaccagctggagatggtcaccgagctgctcggcggcgacatggtgaaccagagcttcatctgcgaccccgacgacgagaccttcatcaagaacatcatcatccaggactgcatgtggtccgggttcagcgccgccgccaagctggtgtccgagaagctggccagctaccaggcggcccggaaggactccggcagccccaacccggcccgggggcactccgtctgcagcacgagctccctctacctgcaggacctgagcgccgcggcctccgagtgcatcgaccccagcgtggtgttcccctaccccctcaacgactccagctcccccaagagctgcgcctcccaggacagctccgccttcagcccctccagcgactccctgctgagctccaccgagagcagcccccagggctcccccgagccgctcgtcctgcacgaggagaccccgcccaccacgagctccgacagcgggggcacccgccggtga

SEQ ID NO: 9854 - RNA, 774 nt, synthetic construct
  misc_feature 1..774: note = derived and/or modified sequence opt2 fromc-myc__Homo_sapiens__EAW92099
  source 1..774: mol_type = other RNA
atgcccctcaacgtctccttcaccaaccgcaactacgacctcgactacgactccgtccagccctacttctactgcgacgaggaggagaacttctaccagcagcagcagcagtccgagctccagccccccgccccctccgaggacatctggaagaagttcgagctcctccccaccccccccctctccccctcccgccgctccggcctctgctccccctcctacgtcgccgtcacccccttctccctccgcggcgacaacgacggcggcggcggctccttctccaccgccgaccagctcgagatggtcaccgagctcctcggcggcgacatggtcaaccagtccttcatctgcgaccccgacgacgagaccttcatcaagaacatcatcatccaggactgcatgtggtccggcttctccgccgccgccaagctcgtctccgagaagctcgcctcctaccaggccgcccgcaaggactccggctcccccaaccccgcccgcggccactccgtctgctccacctcctccctctacctccaggacctctccgccgccgcctccgagtgcatcgacccctccgtcgtcttcccctaccccctcaacgactcctcctcccccaagtcctgcgcctcccaggactcctccgccttctccccctcctccgactccctcctctcctccaccgagtcctccccccagggctcccccgagcccctcgtcctccacgaggagaccccccccaccacctcctccgactccggcggcacccgccgctga

SEQ ID NO: 9855 - RNA, 774 nt, synthetic construct
  misc_feature 1..774: note = derived and/or modified sequence opt3 fromc-myc__Homo_sapiens__EAW92099
  source 1..774: mol_type = other RNA
atgcccctgaacgtgagcttcaccaatagaaactacgacctcgattatgactccgtccagccttacttttattgcgatgaggaagagaatttctaccaacagcagcagcaatctgaacttcagccaccggccccctcagaggacatctggaagaaatttgaactgttgcctacaccacccttaagtcctagcaggcggtccggcctgtgttctccatcgtatgttgctgtgactcccttctcactacgcggggataacgacggaggtggcgggagctttagtacggcagatcagctcgagatggtaaccgagctgcttggaggcgacatggtgaatcagtccttcatttgcgatcctgacgatgaaacatttataaagaacatcattatccaagactgtatgtggtctggtttcagcgccgcggctaaactggtctccgagaagttggcctcataccaggcagcccgaaaagatagtgggagcccaaatccggctcgtggacactctgtgtgctccacttcaagcctctatctgcaggacctgagtgcagccgcttctgaatgtattgacccctccgttgtgtttccttacccactcaacgatagctcgtctcccaagtcctgcgcctcacaggacagtagcgcgttctccccttctagcgattcattactgagttccaccgagagctctccacaaggctcacccgagccgcttgtcttgcatgaagagacacctcccaccacaagtagcgactccggcgggactagaaggtga

SEQ ID NO: 9856 - RNA, 774 nt, synthetic construct
  misc_feature 1..774: note = derived and/or modified sequence opt4 fromc-myc__Homo_sapiens__EAW92099
  source 1..774: mol_type = other RNA
atgcccctgaacgtgagcttcaccaacagaaactacgacctggactacgacagcgtgcagccctacttctactgcgacgaggaggagaacttctaccagcagcagcagcagagcgagctgcagccccccgcccccagcgaggacatctggaagaagttcgagctgctgcccaccccccccctgagccccagcagaagaagcggcctgtgcagccccagctacgtggccgtgacccccttcagcctgagaggcgacaacgacggcggcggcggcagcttcagcaccgccgaccagctggagatggtgaccgagctgctgggcggcgacatggtgaaccagagcttcatctgcgaccccgacgacgagaccttcatcaagaacatcatcatccaggactgcatgtggagcggcttcagcgccgccgccaagctggtgagcgagaagctggccagctaccaggccgccagaaaggacagcggcagccccaaccccgccagaggccacagcgtgtgcagcaccagcagcctgtacctgcaggacctgagcgccgccgccagcgagtgcatcgaccccagcgtggtgttcccctaccccctgaacgacagcagcagccccaagagctgcgccagccaggacagcagcgccttcagccccagcagcgacagcctgctgagcagcaccgagagcagcccccagggcagccccgagcccctggtgctgcacgaggagaccccccccaccaccagcagcgacagcggcggcaccagaagatga

SEQ ID NO: 9857 - RNA, 774 nt, synthetic construct
  misc_feature 1..774: note = derived and/or modified sequence opt5 fromc-myc__Homo_sapiens__EAW92099
  source 1..774: mol_type = other RNA
atgcccctgaacgtgagcttcaccaatagaaactacgacctcgattatgactccgtccagccttacttttattgcgatgaggaagagaatttctaccaacagcagcagcaatctgaactgcagccgcccgcccctagcgaggacatctggaagaaatttgaacttctgcccacacctcccctctccccttctcggcgcagcggcctgtgttccccgtcttatgttgctgtgacgcccttcagccttagaggggataacgacggaggcgggggatcctttagcaccgccgatcagctggagatggtgacagagctcctgggcggggacatggtcaatcagtctttcatttgcgatcctgacgatgaaacctttatcaagaacattatcattcaagactgtatgtggtccggattcagcgcggctgccaaactggtgtctgagaagctcgcctcctaccaggctgcccggaaagatagcggctctcccaatcctgctcgcggccactccgtttgcagcacatcctctctgtatcttcaggacctgagcgccgcggcctccgaatgtatcgaccccagcgtggtctttccgtaccctctcaacgattcttccagccccaagtcttgcgctagccaggactcctctgccttcagcccttccagcgattctctgctttccagcaccgagtctagcccccaagggtcccccgagcctctggtgctccatgaagagacaccgcccaccacgtcctctgacagcggaggcaccagacggtga

SEQ ID NO: 9858 - RNA, 774 nt, synthetic construct
  misc_feature 1..774: note = derived and/or modified sequence opt6 fromc-myc__Homo_sapiens__EAW92099
  source 1..774: mol_type = other RNA
atgccactaaacgtatctttcacaaatagaaactacgacctagactacgactcagtacaaccatacttttactgcgacgaagaagaaaacttctaccaacaacaacaacaatcagaactacaaccacccgcaccatccgaagacatctggaaaaaattcgaattactaccaacaccacccttatcaccatcaagaagatcaggactatgttcaccatcctacgtagctgtaacaccattctcactaagaggagacaacgatggaggaggaggatcattctcaacagcagaccaactagaaatggtaacagaactactcggaggcgacatggtaaatcaatcattcatatgcgaccccgacgatgaaacattcatcaaaaatatcataatacaagactgcatgtggtcaggattctcagcagctgcaaaactcgtatcagaaaaactagcctcataccaagcagcaagaaaagactcaggatcaccaaacccagcaagaggacactcagtatgctcaacatcatcattatacctacaagacttatcagcagcagcatcagaatgcatagacccatcagtcgtattcccatacccactaaacgactcatcttcacctaaatcctgcgcatcacaagattcatcagcattctcaccatcatcagactcactactatcatcaacagaatcatcaccccaaggctcaccagaaccattagtattacacgaagaaacaccaccaacaacctcatctgactctggaggaacaagaagataa

SEQ ID NO: 9859 - protein, 439 aa, synthetic construct
  REGION 1..439: note = c-myc__Homo_sapiens__P01106
MPLNVSFTNRNYDLDYDSVQPYFYCDEEENFYQQQQQSELQPPAPSEDIWKKFELLPTPPLSPSRRSGLCSPSYVAVTPFSLRGDNDGGGGSFSTADQLEMVTELLGGDMVNQSFICDPDDETFIKNIIIQDCMWSGFSAAAKLVSEKLASYQAARKDSGSPNPARGHSVCSTSSLYLQDLSAAASECIDPSVVFPYPLNDSSSPKSCASQDSSAFSPSSDSLLSSTESSPQGSPEPLVLHEETPPTTSSDSEEEQEDEEEIDVVSVEKRQAPGKRSESGSPSAGGHSKPPHSPLVLKRCHVSTHQHNYAAPPSTRKDYPAAKRVKLDSVRVLRQISNNRKCTSPRSSDTEENVKRRTHNVLERQRRNELKRSFFALRDQIPELENNEKAPKVVILKKATAYILSVQAEEQKLISEEDLLRKRREQLKHKLEQLRNSCA

SEQ ID NO: 9860 - RNA, 1320 nt, synthetic construct
  misc_feature 1..1320: note = c-myc__Homo_sapiens__AAA36340
  source 1..1320: mol_type = other RNA
atgcccctcaacgttagcttcaccaacaggaactatgacctcgactacgactcggtgcagccgtatttctactgcgacgaggaggagaacttctaccagcagcagcagcagagcgagctgcagcccccggcgcccagcgaggatatctggaagaaattcgagctgctgcccaccccgcccctgtcccctagccgccgctccgggctctgctcgccctcctacgttgcggtcacacccttctcccttcggggagacaacgacggcggtggcgggagcttctccacggccgaccagctggagatggtgaccgagctgctgggaggagacatggtgaaccagagtttcatctgcgacccggacgacgagaccttcatcaaaaacatcatcatccaggactgtatgtggagcggcttctcggccgccgccaagctcgtctcagagaagctggcctcctaccaggctgcgcgcaaagacagcggcagcccgaaccccgcccgcggccacagcgtctgctccacctccagcttgtacctgcaggatctgagcgccgccgcctcagagtgcatcgacccctcggtggtcttcccctaccctctcaacgacagcagctcgcccaagtcctgcgcctcgcaagactccagcgccttctctccgtcctcggattctctgctctcctcgacggagtcctccccgcagggcagccccgagcccctggtgctccatgaggagacaccgcccaccaccagcagcgactctgaggaggaacaagaagatgaggaagaaatcgatgttgtttctgtggaaaagaggcaggctcctggcaaaaggtcagagtctggatcaccttctgctggaggccacagcaaacctcctcacagcccactggtcctcaagaggtgccacgtctccacacatcagcacaactacgcagcgcctccctccactcggaaggactatcctgctgccaagagggtcaagttggacagtgtcagagtcctgagacagatcagcaacaaccgaaaatgcaccagccccaggtcctcggacaccgaggagaatgtcaagaggcgaacacacaacgtcttggagcgccagaggaggaacgagctaaaacggagcttttttgccctgcgtgaccagatcccggagttggaaaacaatgaaaaggcccccaaggtagttatccttaaaaaagccacagcatacatcctgtccgtccaagcagaggagcaaaagctcatttctgaagaggacttgttgcggaaacgacgagaacagttgaaacacaaacttgaacagctacggaactcttgtgcgtaa

SEQ ID NO: 9861 - RNA, 1320 nt, synthetic construct
  misc_feature 1..1320: note = derived and/or modified sequence opt1 fromc-myc__Homo_sapiens__AAA36340
  source 1..1320: mol_type = other RNA
atgcccctgaacgtgagcttcaccaaccgcaactacgacctcgactacgactccgtccagccgtacttctactgcgacgaggaggagaacttctaccagcagcagcagcagagcgagctgcagccgcccgccccctccgaggacatctggaagaagttcgagctgctcccgaccccgcccctgagcccctcccggcgcagcggcctgtgctcccccagctacgtggccgtgacgcccttctccctccgcggggacaacgacggcgggggcgggagcttctccaccgcggaccagctggagatggtcaccgagctgctcggcggcgacatggtgaaccagagcttcatctgcgaccccgacgacgagaccttcatcaagaacatcatcatccaggactgcatgtggtccgggttcagcgccgccgccaagctggtgtccgagaagctggccagctaccaggcggcccggaaggactccggcagccccaacccggcccgggggcactccgtctgcagcacgagctccctctacctgcaggacctgagcgccgcggcctccgagtgcatcgaccccagcgtggtgttcccctaccccctcaacgactccagctcccccaagagctgcgcctcccaggacagctccgccttcagcccctccagcgactccctgctgagctccaccgagagcagcccccagggctcccccgagccgctcgtcctgcacgaggagaccccgcccaccacgagctccgacagcgaggaggagcaggaggacgaggaggagatcgacgtggtgtccgtcgagaagcgccaggcccccgggaagcggagcgagtccggcagcccctccgcgggcgggcacagcaagccgccccacagccccctggtgctcaagcgctgccacgtgtccacccaccagcacaactacgccgccccgccctccacccggaaggactaccccgccgccaagcgcgtcaagctggacagcgtgcgggtgctgcgccagatctccaacaaccggaagtgcaccagcccccgctccagcgacacggaggagaacgtcaagcggcgcacccacaacgtgctcgagcggcagcgccggaacgagctgaagcgctccttcttcgcgctgcgggaccagatccccgagctcgagaacaacgagaaggcccccaaggtggtcatcctgaagaaggccaccgcctacatcctgagcgtgcaggccgaggagcagaagctcatcagcgaggaggacctgctgcgcaagcgccgggagcagctcaagcacaagctggagcagctgcgcaactcctgcgcgtga

SEQ ID NO: 9862 - RNA, 1320 nt, synthetic construct
  misc_feature 1..1320: note = derived and/or modified sequence opt2 fromc-myc__Homo_sapiens__AAA36340
  source 1..1320: mol_type = other RNA
atgcccctcaacgtctccttcaccaaccgcaactacgacctcgactacgactccgtccagccctacttctactgcgacgaggaggagaacttctaccagcagcagcagcagtccgagctccagccccccgccccctccgaggacatctggaagaagttcgagctcctccccaccccccccctctccccctcccgccgctccggcctctgctccccctcctacgtcgccgtcacccccttctccctccgcggcgacaacgacggcggcggcggctccttctccaccgccgaccagctcgagatggtcaccgagctcctcggcggcgacatggtcaaccagtccttcatctgcgaccccgacgacgagaccttcatcaagaacatcatcatccaggactgcatgtggtccggcttctccgccgccgccaagctcgtctccgagaagctcgcctcctaccaggccgcccgcaaggactccggctcccccaaccccgcccgcggccactccgtctgctccacctcctccctctacctccaggacctctccgccgccgcctccgagtgcatcgacccctccgtcgtcttcccctaccccctcaacgactcctcctcccccaagtcctgcgcctcccaggactcctccgccttctccccctcctccgactccctcctctcctccaccgagtcctccccccagggctcccccgagcccctcgtcctccacgaggagaccccccccaccacctcctccgactccgaggaggagcaggaggacgaggaggagatcgacgtcgtctccgtcgagaagcgccaggcccccggcaagcgctccgagtccggctccccctccgccggcggccactccaagcccccccactcccccctcgtcctcaagcgctgccacgtctccacccaccagcacaactacgccgcccccccctccacccgcaaggactaccccgccgccaagcgcgtcaagctcgactccgtccgcgtcctccgccagatctccaacaaccgcaagtgcacctccccccgctcctccgacaccgaggagaacgtcaagcgccgcacccacaacgtcctcgagcgccagcgccgcaacgagctcaagcgctccttcttcgccctccgcgaccagatccccgagctcgagaacaacgagaaggcccccaaggtcgtcatcctcaagaaggccaccgcctacatcctctccgtccaggccgaggagcagaagctcatctccgaggaggacctcctccgcaagcgccgcgagcagctcaagcacaagctcgagcagctccgcaactcctgcgcctga

SEQ ID NO: 9863 - RNA, 1320 nt, synthetic construct
  misc_feature 1..1320: note = derived and/or modified sequence opt3 fromc-myc__Homo_sapiens__AAA36340
  source 1..1320: mol_type = other RNA
atgcccctgaacgtgagcttcaccaatagaaactacgacctcgattatgactccgtccagccttacttttattgcgatgaggaagagaatttctaccaacagcagcagcaatctgaacttcagccaccggccccctcagaggacatctggaagaaatttgaactgttgcctacaccacccttaagtcctagcaggcggtccggcctgtgttctccatcgtatgttgctgtgactcccttctcactacgcggggataacgacggaggtggcgggagctttagtacggcagatcagctcgagatggtaaccgagctgcttggaggcgacatggtgaatcagtccttcatttgcgatcctgacgatgaaacatttataaagaacatcattatccaagactgtatgtggtctggtttcagcgccgcggctaaactggtctccgagaagttggcctcataccaggcagcccgaaaagatagtgggagcccaaatccggctcgtggacactctgtgtgctccacttcaagcctctatctgcaggacctgagtgcagccgcttctgaatgtattgacccctccgttgtgtttccttacccactcaacgatagctcgtctcccaagtcctgcgcctcacaggacagtagcgcgttctccccttctagcgattcattactgagttccaccgagagctctccacaaggctcacccgagccgcttgtcttgcatgaagagacacctcccaccacaagtagcgactccgaagaggaacaggaggatgaggaagagatcgacgtggtatctgttgaaaagagacaggcaccaggcaaaaggtcggagagcgggtccccttcagccggaggtcacagtaagcccccacattctcccctggtgctaaaacggtgtcacgtcagcactcatcaacacaattacgctgcccctccatccacccgcaaggattatccggcagctaaaagagtgaagctcgactcagtgagggtcctgcggcagataagcaacaatcgcaagtgcacgtctccccgatccagtgatactgaagagaacgttaaaagaaggacccacaatgtgcttgagcggcagcgtcgcaacgaactgaagaggagctttttcgccttgagagaccagatccctgagctcgaaaataacgagaaagcgccaaaggtagtgattctgaaaaaggccacagcatacatcttatctgtccaagctgaggaacagaaactgatttccgaggaagatctccttcggaagcgacgcgagcagctgaagcataaattggaacagctaagaaactcatgtgcctga

SEQ ID NO: 9864 - RNA, 1320 nt, synthetic construct
  misc_feature 1..1320: note = derived and/or modified sequence opt4 fromc-myc__Homo_sapiens__AAA36340
  source 1..1320: mol_type = other RNA
atgcccctgaacgtgagcttcaccaacagaaactacgacctggactacgacagcgtgcagccctacttctactgcgacgaggaggagaacttctaccagcagcagcagcagagcgagctgcagccccccgcccccagcgaggacatctggaagaagttcgagctgctgcccaccccccccctgagccccagcagaagaagcggcctgtgcagccccagctacgtggccgtgacccccttcagcctgagaggcgacaacgacggcggcggcggcagcttcagcaccgccgaccagctggagatggtgaccgagctgctgggcggcgacatggtgaaccagagcttcatctgcgaccccgacgacgagaccttcatcaagaacatcatcatccaggactgcatgtggagcggcttcagcgccgccgccaagctggtgagcgagaagctggccagctaccaggccgccagaaaggacagcggcagccccaaccccgccagaggccacagcgtgtgcagcaccagcagcctgtacctgcaggacctgagcgccgccgccagcgagtgcatcgaccccagcgtggtgttcccctaccccctgaacgacagcagcagccccaagagctgcgccagccaggacagcagcgccttcagccccagcagcgacagcctgctgagcagcaccgagagcagcccccagggcagccccgagcccctggtgctgcacgaggagaccccccccaccaccagcagcgacagcgaggaggagcaggaggacgaggaggagatcgacgtggtgagcgtggagaagagacaggcccccggcaagagaagcgagagcggcagccccagcgccggcggccacagcaagcccccccacagccccctggtgctgaagagatgccacgtgagcacccaccagcacaactacgccgccccccccagcaccagaaaggactaccccgccgccaagagagtgaagctggacagcgtgagagtgctgagacagatcagcaacaacagaaagtgcaccagccccagaagcagcgacaccgaggagaacgtgaagagaagaacccacaacgtgctggagagacagagaagaaacgagctgaagagaagcttcttcgccctgagagaccagatccccgagctggagaacaacgagaaggcccccaaggtggtgatcctgaagaaggccaccgcctacatcctgagcgtgcaggccgaggagcagaagctgatcagcgaggaggacctgctgagaaagagaagagagcagctgaagcacaagctggagcagctgagaaacagctgcgcctga

SEQ ID NO: 9865 - RNA, 1320 nt, synthetic construct
  misc_feature 1..1320: note = derived and/or modified sequence opt5 fromc-myc__Homo_sapiens__AAA36340
  source 1..1320: mol_type = other RNA
atgcccctgaacgtgagcttcaccaatagaaactacgacctcgattatgactccgtccagccttacttttattgcgatgaggaagagaatttctaccaacagcagcagcaatctgaactgcagccgcccgcccctagcgaggacatctggaagaaatttgaacttctgcccacacctcccctctccccttctcggcgcagcggcctgtgttccccgtcttatgttgctgtgacgcccttcagccttagaggggataacgacggaggcgggggatcctttagcaccgccgatcagctggagatggtgacagagctcctgggcggggacatggtcaatcagtctttcatttgcgatcctgacgatgaaacctttatcaagaacattatcattcaagactgtatgtggtccggattcagcgcggctgccaaactggtgtctgagaagctcgcctcctaccaggctgcccggaaagatagcggctctcccaatcctgctcgcggccactccgtttgcagcacatcctctctgtatcttcaggacctgagcgccgcggcctccgaatgtatcgaccccagcgtggtctttccgtaccctctcaacgattcttccagccccaagtcttgcgctagccaggactcctctgccttcagcccttccagcgattctctgctttccagcaccgagtctagcccccaagggagccccgagcctctggtgctccatgaagagacaccgcccaccacgtcctctgacagcgaagaggaacaggaggatgaggaagagatcgacgttgtgtccgtcgaaaagagacaggctcctggaaaacggtctgagagcggctcccccagcgccgggggacactctaagcctccccattccccgctggtgctgaaacgctgtcacgtgagcacccatcaacacaattacgcggcccctccctctacaagaaaggattatcctgctgccaaacgggtcaagctcgactccgttcgcgtgctgagacagattagcaacaatcggaagtgcacctctccccgcagctccgatacagaagagaacgtgaaaagacggacccacaatgtccttgagcgccagagacggaacgaactgaagagatcctttttcgctctccgcgaccagatccctgagctggaaaataacgagaaagcccccaaggtggttattcttaaaaaggccacggcttacatcctgtctgtgcaagcggaggaacagaaactcatttccgaggaagatctgctgcggaagagacgcgagcagctcaagcataaactggaacagcttcggaacagctgtgcctga

SEQ ID NO: 9866 - RNA, 1320 nt, synthetic construct
  misc_feature 1..1320: note = derived and/or modified sequence opt6 fromc-myc__Homo_sapiens__AAA36340
  source 1..1320: mol_type = other RNA
atgccattaaacgtctctttcacaaacagaaattacgacctagactacgattcagtacaaccatatttttactgcgacgaagaagaaaacttctatcaacaacaacaacaatcagaactccaaccaccagctccctctgaagacatctggaaaaaattcgaactattaccaacaccaccattatctccttcacgaagatcaggtctatgctcaccatcatacgtagccgttaccccattctcattacgtggcgataacgatggaggcggaggatcattctcaacagctgatcaattagaaatggtcacagaactactcggaggtgatatggttaatcaaagcttcatttgtgatccagatgacgaaacattcataaaaaacattataatacaagattgcatgtggtcaggattctcagcagcagcaaaattagtatcagaaaaactagcttcatatcaagcagcaagaaaagattccggctcaccaaaccccgcacgaggacattcagtatgcagcacctcatcattatacttacaagacctctcagctgcagcatcagaatgcatagacccatccgtagtatttccatacccacttaacgattcttcatcaccaaaatcatgcgcatcccaagattcaagtgcattctcaccgtcatcagactcattactctcatccacagaatctagccctcaaggatcaccagaaccattagtattacatgaagaaacaccaccaacaacatcatcagactccgaagaagaacaagaagacgaagaagaaattgacgtagtttcagtagaaaaaagacaagcacccggaaaacgatcagaatcaggttcaccctcagcaggaggccacagcaaaccaccacactcaccactagtattaaaaagatgccacgtatcaacacaccaacacaactacgcagcaccaccatcaacaagaaaagattaccctgcagcaaaaagagtcaaactagactcagtcagagtattacgccaaatatcaaataatagaaaatgcacatcaccaagatcatccgacacagaagaaaacgtaaaacgacgaacacataacgtactagaaagacaaagaagaaacgaactaaaacgatccttcttcgcattacgagaccaaatccccgaactagaaaacaacgaaaaagcaccaaaagtagttattctaaaaaaagcaacagcttacatactctcagtacaagccgaagaacaaaaattaatctctgaagaagatctactcagaaaaagacgcgaacaactaaaacacaaactagaacaactaagaaattcatgcgcataa

SEQ ID NO: 9867 - protein, 188 aa, synthetic construct [sequence omitted]

SEQ ID NO: 9868 - RNA, 567 nt, synthetic construct
  misc_feature 1..567: note = c-myc__Homo_sapiens__AAA59886
  source 1..567: mol_type = other RNA
atgcgagggtctggacggctgaggacccccgagctggtctgctcgcggccgccaccgccgggccccggccgtccctggctcccctcctgcctcgagaagggcagggcttctcagaggcttggcgggaaaaagaacggagggagggatcgcgctgagtataaaagccggttttcggggctttatctaactcgctgtagtaattccagcgagaggcagagggagcgagcgggcggccggctagggtggaagagccgggcgagcagagctgcgctgcgggcgtcctgggaagggagatccggagcgaatagggggcttcgcctctggcccagccctcccgctgatcccccagccagccgtccgcaacccttgccgcatccacgaaactttgcccatagcagcgggcgggcactttgcactggaacttacaacacccgagcaaggacgcgactctcccgacgcggggaggctattctgcccatttggggacacttccccgccgctgccaggacccgcttctctgaaaggctctccttgcagctgcttagacgctggatttttttcgggtag

SEQ ID NO: 9869 - RNA, 567 nt, synthetic construct
  misc_feature 1..567: note = derived and/or modified sequence opt1 fromc-myc__Homo_sapiens__AAA59886
  source 1..567: mol_type = other RNA
atgcgcggcagcgggcggctgcgcacccccgagctcgtgtgctcccggccgcccccgcccggccccgggcgcccctggctgcccagctgcctggagaagggccgggcctcccagcgcctcgggggcaagaagaacggcgggcgggaccgcgccgagtacaagagccggttctccggcctgtacctgacccgctgcagcaactccagcgagcggcagcgcgagcgggccgggggccgcctcgggtggaagtcccgggcgagccgcgccgccctgcgggcctcctgggagggccgcagcggcgcgaaccgggggctgcgcctctggccctccccgcccgccgacccgcccgccagccggccccagcccctgccccacccccgcaacttcgcccactccagcggccgcgcgctgtgcacggggacctacaacacccgggcccgcacccggctctcccgccggggcgaggccatcctgccgatctggggccacttccccgccgccgcgcgcacgcggttcagcgagcgcctgtccctccagctgctgcggcgctggatcttcttcgggtga

SEQ ID NO: 9870 - RNA, 567 nt, synthetic construct
  misc_feature 1..567: note = derived and/or modified sequence opt2 fromc-myc__Homo_sapiens__AAA59886
  source 1..567: mol_type = other RNA
atgcgcggctccggccgcctccgcacccccgagctcgtctgctcccgcccccccccccccggccccggccgcccctggctcccctcctgcctcgagaagggccgcgcctcccagcgcctcggcggcaagaagaacggcggccgcgaccgcgccgagtacaagtcccgcttctccggcctctacctcacccgctgctccaactcctccgagcgccagcgcgagcgcgccggcggccgcctcggctggaagtcccgcgcctcccgcgccgccctccgcgcctcctgggagggccgctccggcgccaaccgcggcctccgcctctggccctccccccccgccgacccccccgcctcccgcccccagcccctcccccacccccgcaacttcgcccactcctccggccgcgccctctgcaccggcacctacaacacccgcgcccgcacccgcctctcccgccgcggcgaggccatcctccccatctggggccacttccccgccgccgcccgcacccgcttctccgagcgcctctccctccagctcctccgccgctggatcttcttcggctga

SEQ ID NO: 9871 - RNA, 567 nt, synthetic construct
  misc_feature 1..567: note = derived and/or modified sequence opt3 fromc-myc__Homo_sapiens__AAA59886
  source 1..567: mol_type = other RNA
atgagaggcagcgggaggctgcggacccccgagctcgtgtgctcccgccctccaccgcccggacctggtcgaccatggcttccctcttgtctggaaaagggccgtgcctcacagagattgggagggaaaaagaacggcggtagggaccgggctgagtacaaaagtcgcttcagcgggttatatctgacaagatgctccaattcttcggaaaggcaacgggagcgcgcaggaggccgactaggctggaagtcaagagccagcagggcggctctccgggccagttgggaagggcgttccggagcaaaccgcggtctgagactttggccttctccacccgccgatcctccagctagcaggccgcagcccctgcctcacccacggaattttgcacattcctcaggccgagccttgtgtactgggacgtacaacacccgcgctagaacaaggctcagtcggcgcggagaggccatcctgcccatttggggccacttccctgcggcagccagaactaggtttagcgagcgtctgtctctccagttactgcggcgatggatattctttggttga

SEQ ID NO: 9872 - RNA, 567 nt, synthetic construct
  misc_feature 1..567: note = derived and/or modified sequence opt4 fromc-myc__Homo_sapiens__AAA59886
  source 1..567: mol_type = other RNA
atgagaggcagcggcagactgagaacccccgagctggtgtgcagcagaccccccccccccggccccggcagaccctggctgcccagctgcctggagaagggcagagccagccagagactgggcggcaagaagaacggcggcagagacagagccgagtacaagagcagattcagcggcctgtacctgaccagatgcagcaacagcagcgagagacagagagagagagccggcggcagactgggctggaagagcagagccagcagagccgccctgagagccagctgggagggcagaagcggcgccaacagaggcctgagactgtggcccagcccccccgccgacccccccgccagcagaccccagcccctgccccaccccagaaacttcgcccacagcagcggcagagccctgtgcaccggcacctacaacaccagagccagaaccagactgagcagaagaggcgaggccatcctgcccatctggggccacttccccgccgccgccagaaccagattcagcgagagactgagcctgcagctgctgagaagatggatcttcttcggctga

SEQ ID NO: 9873 - RNA, 567 nt, synthetic construct
  misc_feature 1..567: note = derived and/or modified sequence opt5 fromc-myc__Homo_sapiens__AAA59886
  source 1..567: mol_type = other RNA
atgagaggcagcgggcggctgcgcacccccgagctcgtgtgctccagacctccgccccctggacccggccggccttggctgccctcttgtcttgaaaaggggcgcgccagccagagactgggaggcaagaagaacgggggacgggaccgcgctgagtacaaatccagattctctggcctctatctgacacggtgcagcaattcctctgaacgccaaagagagcgggccggcgggcgccttggatggaaaagcagagcgtcccgggctgccctgcgcgccagctgggaaggcagatctggggctaaccggggactcagactgtggccttccccgcccgccgatcctcccgctagccgccctcagcccctgccgcaccctcggaattttgcccattcttccggcagagcgctctgtacggggacctacaacacacgcgcccggaccagactgagccgccggggagaggctatccttcccatttggggccacttccctgccgctgccagaacacgcttttctgagcggctgtccctccagctgcttagacgctggatcttctttggctga

SEQ ID NO: 9874 - RNA, 567 nt, synthetic construct
  misc_feature 1..567: note = derived and/or modified sequence opt6 fromc-myc__Homo_sapiens__AAA59886
  source 1..567: mol_type = other RNA
atgagaggtagtggaagattaagaacaccagaattagtatgtagcagaccaccaccaccaggaccaggaagaccatggttaccaagctgtttagaaaaaggaagagcaagccagagactaggaggaaaaaaaaatggaggaagagatagagctgaatataaaagtagattttcaggactatatttaacaagatgtagtaacagttcagaaagacaaagagaaagagcaggaggaagattaggatggaaatcaagagcatcaagggcagcattaagagcatcatgggaaggaaggagtggagcaaatcgaggattaagattatggccatcaccaccagcagatccaccagctagtagaccacaaccgctaccacatccaagaaattttgcacattcaagcggaagagcactatgtactggaacatataatacaagagcaagaacaagattaagtagaagaggagaagcaatactaccaatatggggacattttccagcagcagcaaggacacgatttagtgaaagattaagtttacaactattaagaagatggatattttttggataa

SEQ ID NO: 9875 - protein, 188 aa, synthetic construct
  REGION 1..188: note = c-myc__Homo_sapiens__Q16591
MRGSGRLRTPELCCSRPPPPGPGRPWLPSCLEKGRASQRLGGKKNGGRDRAEYKSRFSGLYLTRCSNSSERQRERAGGRLGWKSRASRAALRASWEGRSGANRGLRLWPSPPADPPASGPQPLPHPRNFAHSSGRALCTGTYNTRARTRLSRRGEAILPIWGHFPAAARTRFSERLSLQLLRRWIFFG

SEQ ID NO: 9876 - RNA, 567 nt, synthetic construct
  misc_feature 1..567: note = c-myc__Homo_sapiens__AAA59887
  source 1..567: mol_type = other RNA
atgcgagggtctggacggctgaggacccccgagctgtgctgctcgcggccgccaccgccgggccccggccgtccctggctcccctcctgcctcgagaagggcagggcttctcagaggcttggcgggaaaaagaacggagggagggatcgcgctgagtataaaagccggttttcggggctttatctaactcgctgtagtaattccagcgagaggcagagggagcgagcgggcggccggctagggtggaagagccgggcgagcagagctgcgctgcgggcgtcctgggaagggagatccggagcgaatagggggcttcgcctctggcccagccctcccgctgatcccccagccagcggtccgcaacccttgccgcatccacgaaactttgcccatagcagcgggcgggcactttgcactggaacttacaacacccgagcaaggacgcgactctcccgacgcggggaggctattctgcccatttggggacacttccccgccgctgccaggacccgcttctctgaaaggctctccttgcagctgcttagacgctggatttttttcgggtag

SEQ ID NO: 9877 - RNA, 567 nt, synthetic construct
  misc_feature 1..567: note = derived and/or modified sequence opt1 fromc-myc__Homo_sapiens__AAA59887
  source 1..567: mol_type = other RNA
atgcgcggcagcgggcggctgcgcacccccgagctctgctgctcccggccgcccccgcccggccccgggcgcccctggctgcccagctgcctggagaagggccgggcctcccagcgcctcgggggcaagaagaacggcgggcgggaccgcgccgagtacaagagccggttctccggcctgtacctgacccgctgcagcaactccagcgagcggcagcgcgagcgggccgggggccgcctcgggtggaagtcccgggcgagccgcgccgccctgcgggcctcctgggagggccgcagcggcgcgaaccgggggctgcgcctctggccctccccgcccgccgacccgcccgccagcggcccccagcccctgccccacccccggaacttcgcccactccagcgggcgcgcgctgtgcacgggcacctacaacacccgcgcccggacccgcctctcccggcgcggcgaggccatcctgccgatctgggggcacttccccgccgccgcgcggacgcgcttcagcgagcggctgtccctccagctgctgcgccggtggatcttcttcggctga

SEQ ID NO: 9878 - RNA, 567 nt, synthetic construct
  misc_feature 1..567: note = derived and/or modified sequence opt2 fromc-myc__Homo_sapiens__AAA59887
  source 1..567: mol_type = other RNA
atgcgcggctccggccgcctccgcacccccgagctctgctgctcccgcccccccccccccggccccggccgcccctggctcccctcctgcctcgagaagggccgcgcctcccagcgcctcggcggcaagaagaacggcggccgcgaccgcgccgagtacaagtcccgcttctccggcctctacctcacccgctgctccaactcctccgagcgccagcgcgagcgcgccggcggccgcctcggctggaagtcccgcgcctcccgcgccgccctccgcgcctcctgggagggccgctccggcgccaaccgcggcctccgcctctggccctccccccccgccgacccccccgcctccggcccccagcccctcccccacccccgcaacttcgcccactcctccggccgcgccctctgcaccggcacctacaacacccgcgcccgcacccgcctctcccgccgcggcgaggccatcctccccatctggggccacttccccgccgccgcccgcacccgcttctccgagcgcctctccctccagctcctccgccgctggatcttcttcggctga

SEQ ID NO: 9879 - RNA, 567 nt, synthetic construct
  misc_feature 1..567: note = derived and/or modified sequence opt3 fromc-myc__Homo_sapiens__AAA59887
  source 1..567: mol_type = other RNA
atgagaggcagcgggaggctgcggacccccgagctctgctgttcccgccctccaccgcccggacctggtcgaccatggcttccctcttgcctggaaaagggccgtgcctcacagagattgggagggaaaaagaacggcggtagggaccgggctgagtacaaaagtcgcttcagcgggttatatctgacaagatgttccaattcttcggaaaggcaacgggagcgcgcaggaggccgactaggctggaagtcaagagccagcagggcggctctccgggccagttgggaagggcgttccggagcaaaccgcggtctgagactttggccttctccacccgccgatcctccagctagcggcccgcagcccctgcctcacccaaggaattttgcacattcctcagggcgggccttgtgcactggaacgtacaacacccgagctcgcacaagactcagtaggcggggcgaggccatcctgcccatttggggtcacttccctgcggcagcccgcactagatttagcgagaggctgtctctccagttactgcgtcggtggatattctttgggtga

SEQ ID NO: 9880 - RNA, 567 nt, synthetic construct
  misc_feature 1..567: note = derived and/or modified sequence opt4 fromc-myc__Homo_sapiens__AAA59887
  source 1..567: mol_type = other RNA
atgagaggcagcggcagactgagaacccccgagctgtgctgcagcagaccccccccccccggccccggcagaccctggctgcccagctgcctggagaagggcagagccagccagagactgggcggcaagaagaacggcggcagagacagagccgagtacaagagcagattcagcggcctgtacctgaccagatgcagcaacagcagcgagagacagagagagagagccggcggcagactgggctggaagagcagagccagcagagccgccctgagagccagctgggagggcagaagcggcgccaacagaggcctgagactgtggcccagcccccccgccgacccccccgccagcggcccccagcccctgccccaccccagaaacttcgcccacagcagcggcagagccctgtgcaccggcacctacaacaccagagccagaaccagactgagcagaagaggcgaggccatcctgcccatctggggccacttccccgccgccgccagaaccagattcagcgagagactgagcctgcagctgctgagaagatggatcttcttcggctga

SEQ ID NO: 9881 - RNA, 567 nt, synthetic construct
  misc_feature 1..567: note = derived and/or modified sequence opt5 fromc-myc__Homo_sapiens__AAA59887
  source 1..567: mol_type = other RNA
atgagaggcagcgggcggctgcgcacccccgagctctgctgttccagacctccgccccctggacccggccggccttggctgccctcttgccttgaaaaggggcgcgccagccagagactgggaggcaagaagaacgggggacgggaccgcgctgagtacaaatccagattctctggcctctatctgacacggtgtagcaattcctctgaacgccaaagagagcgggccggcgggcgccttggatggaaaagcagagcgtcccgggctgccctgcgcgccagctgggaaggcagatctggggctaaccggggactcagactgtggccttccccgcccgccgatcctcccgctagcggccctcagcccctgccgcaccctcgcaattttgcccattcttccgggcgggcgctctgcacgggaacctacaacacaagagcccgcacccggctgagcagacgcggcgaggctatccttcccatttggggccacttccctgccgctgcccggacaagattttctgagcgcctgtccctccagctgcttcggagatggatcttctttgggtga

SEQ ID NO: 9882 - RNA, 567 nt, synthetic construct
  misc_feature 1..567: note = derived and/or modified sequence opt6 fromc-myc__Homo_sapiens__AAA59887
  source 1..567: mol_type = other RNA
atgagaggatcaggaagactaagaacaccagaattatgctgtagtagaccaccaccaccaggaccaggaagaccatggttaccaagttgtttagaaaaaggaagagcgagtcaaagattaggaggaaaaaaaaatggaggaagagacagagcagaatataaaagcagattttcaggtttatatttaacaagatgttcaaattcaagtgaaagacaaagagaaagagcaggaggaagactaggatggaaatcaagagcaagtagagcagcattaagagcatcgtgggaaggaagaagtggagcaaatagaggattaagattatggccatcaccaccagcggatccaccagcatcaggaccacaaccattaccacatccaagaaattttgcacatagtagtggaagagcattatgtacaggaacatataatacaagagcgagaacaagattaagcagaagaggagaagcaatattacctatatggggacactttccagcagcagcaagaacaagatttagtgaaagactaagtttacaattattaagaagatggatattttttggttaa

SEQ ID NO: 9883 - protein, 353 aa, synthetic construct
  REGION 1..353: note = Klf1__Homo_sapiens__K7VKE0
MATAETALPSISTLTALGPFPDTQDDFLKWWRSEEAQDMGPGPPDPTEPPLHVKSEDQPGEEEDDERGADATWDLDLLLTNFSGPEPGGAPQTCALAPSEASGAQYPPPPETLGAYAGGPGLVAGLLGSEDHSGWVRPALRARAPDAFVGPALAPAPAPEPKALALQPVYPGPGARRRLLGWLLPADRAFSACGVGRPLRATVRVPRDVPGASVPRALPALPRAPGTRARSRHVPLLPELFGTRDGGHWTRGDCRGSRCDSRDRAIQARPTFVGAQEAGSAHVRAPGLRQELHQELPPEGASAHAHRGEAIRLHVGRLRLEIRALGRADPPLPETHGAAPLPLPALPTCFFAL

SEQ ID NO: 9884 - RNA, 1062 nt, synthetic construct
  misc_feature 1..1062: note = Klf1__Homo_sapiens__AFW90650
  source 1..1062: mol_type = other RNA
atggccacagccgagaccgccttgccctccatcagcacactgaccgccctgggccccttcccggacacacaggatgacttcctcaagtggtggcgctccgaagaggcgcaggacatgggcccgggtcctcctgaccccacggagccgcccctccacgtgaagtctgaggaccagcccggggaggaagaggacgatgagaggggcgcggacgccacctgggacctggatctcctcctcaccaacttctcgggcccggagcccggtggcgcgccccagacctgcgctctggcgcccagcgaggcctccggggcgcaatatccgccgccgcccgagactctgggcgcatatgctggcggcccggggctggtggctgggcttttgggttcggaggatcactcgggttgggtgcgccctgccctgcgagcccgggctcccgacgccttcgtgggcccagccctggctccagccccggcccccgagcccaaggcgctggcgctgcaaccggtgtacccggggcccggcgcccggcgccggctcctcgggtggctacttcccgcggaccgggctttcagtgcctgcggcgtcgggcgccccctacgggctactgtccgggtaccccgcgatgtacccggcgcctcagtaccaagggcacttccagctcttccgcgggctccagggacccgcgcccggtcccgccacgtccccctccttcctgagttgtttgggacccgggacggtgggcactggactcggggggactgcagaggatccaggtgtgatagccgagaccgcgccatccaagcgaggccgacgttcgtgggcgcgcaagaggcaggcagcgcacacgtgcgcgcacccgggttgcggcaagagctacaccaagagctcccacctgaaggcgcatctgcgcacgcacacaggggagaagccatacgcctgcacgtgggaaggctgcggctggagattcgcgcgctcggacgagctgacccgccactaccggaaacacacggggcagcgccccttccgctgccagctctgcccacgtgctttttcgcgctctga

SEQ ID NO: 9885 - RNA, 1062 nt, synthetic construct
  misc_feature 1..1062: note = derived and/or modified sequence opt1 fromKlf1__Homo_sapiens__AFW90650
  source 1..1062: mol_type = other RNA
atggccaccgccgagaccgcgctgcccagcatctccacgctcaccgccctgggccccttccccgacacccaggacgacttcctgaagtggtggcgcagcgaggaggcccaggacatggggcccgggcccccggaccccaccgagccgcccctccacgtgaagtccgaggaccagcccggggaggaggaggacgacgagcggggcgccgacgccacgtgggacctggacctgctcctgaccaacttcagcgggcccgagcccggcggcgcgccccagacctgcgccctggccccgtccgaggccagcggggcgcagtacccgcccccgcccgagaccctcggcgcctacgccgggggccccgggctggtcgccggcctgctcggctccgaggaccacagcgggtgggtgcgccccgccctgcgggcgcgcgcccccgacgccttcgtgggccccgccctggcccccgcgcccgcccccgagccgaaggccctcgccctgcagcccgtctaccccgggcccggcgcccggcgccggctgctcggctggctgctgccggcggaccgcgccttctccgcctgcggggtgggccggcccctccgcgccacggtgcgggtcccccgcgacgtgccgggggccagcgtgccccgggcgctgcccgccctgccccgcgccccgggcacccgggcccgctcccggcacgtccccctcctgcccgagctgttcgggacccgcgacggcggccactggacccggggcgactgccgcggcagccggtgcgactcccgcgaccgcgcgatccaggcccggcccacgttcgtgggggcccaggaggccggcagcgcccacgtgcgcgcgccggggctccggcaggagctgcaccaggagctgccgcccgagggcgcctccgcccacgcccaccgcggcgaggccatccggctccacgtcgggcgcctgcggctggagatccgcgcgctcggccgggccgacccgcccctgcccgagacccacggggccgcgcccctgcccctccccgccctgccgacctgcttcttcgccctgtga

SEQ ID NO: 9886 - RNA, 1062 nt, synthetic construct
  misc_feature 1..1062: note = derived and/or modified sequence opt2 fromKlf1__Homo_sapiens__AFW90650
  source 1..1062: mol_type = other RNA
atggccaccgccgagaccgccctcccctccatctccaccctcaccgccctcggccccttccccgacacccaggacgacttcctcaagtggtggcgctccgaggaggcccaggacatgggccccggcccccccgaccccaccgagccccccctccacgtcaagtccgaggaccagcccggcgaggaggaggacgacgagcgcggcgccgacgccacctgggacctcgacctcctcctcaccaacttctccggccccgagcccggcggcgccccccagacctgcgccctcgccccctccgaggcctccggcgcccagtacccccccccccccgagaccctcggcgcctacgccggcggccccggcctcgtcgccggcctcctcggctccgaggaccactccggctgggtccgccccgccctccgcgcccgcgcccccgacgccttcgtcggccccgccctcgcccccgcccccgcccccgagcccaaggccctcgccctccagcccgtctaccccggccccggcgcccgccgccgcctcctcggctggctcctccccgccgaccgcgccttctccgcctgcggcgtcggccgccccctccgcgccaccgtccgcgtcccccgcgacgtccccggcgcctccgtcccccgcgccctccccgccctcccccgcgcccccggcacccgcgcccgctcccgccacgtccccctcctccccgagctcttcggcacccgcgacggcggccactggacccgcggcgactgccgcggctcccgctgcgactcccgcgaccgcgccatccaggcccgccccaccttcgtcggcgcccaggaggccggctccgcccacgtccgcgcccccggcctccgccaggagctccaccaggagctcccccccgagggcgcctccgcccacgcccaccgcggcgaggccatccgcctccacgtcggccgcctccgcctcgagatccgcgccctcggccgcgccgacccccccctccccgagacccacggcgccgcccccctccccctccccgccctccccacctgcttcttcgccctctga

SEQ ID NO: 9887 - RNA, 1062 nt, synthetic construct
  misc_feature 1..1062: note = derived and/or modified sequence opt3 fromKlf1__Homo_sapiens__AFW90650
  source 1..1062: mol_type = other RNA
atggccaccgctgagacagcactgcccagcatctccactctcacggcccttggccctttcccagacacccaggatgactttctgaagtggtggagatctgaagaggcgcaagatatggggccgggaccccctgacccaacagaaccccctttgcacgtgaaatcagaggatcagccaggtgaagaggaggacgatgaaaggggcgctgacgccacttgggatttagacctgctactcaccaacttcagtgggcccgagcctggaggcgcaccacagacatgcgccctggctccgagcgaagcatccggtgcccagtatccccctccacccgagacccttggggcttacgccggaggccctggcctggtcgcggggttgctcggatctgaggatcattcgggttgggttcggccagcactgcgcgcccgagctcccgacgcctttgtgggcccggcactggctcctgcccccgcgccagaacctaaggccctcgcattacaacccgtatacccagggcccggagctcgtagaaggctgcttggctggttgctgcctgccgatcgggctttctcagcctgtggtgtggggcgcccactaagagcaactgtcagggtgccgcgggacgttcccggagccagcgtgcctcgcgctctcccagcgctgccccgagcacctggcacaagagccaggagtcggcacgtcccacttctgcccgagttgtttggcacccgtgacgggggacattggacgcgcggtgattgcagaggctccaggtgtgactctcgggatcgagctattcaggcccgcccgactttcgtgggggcacaggaagccggaagcgctcacgtaagagcccctggcctcaggcaggagctgcatcaagaattaccacccgagggtgcatccgcgcacgctcaccgcggggaggccatacggctgcatgttggcagactcaggcttgaaatccgtgcactgggacgggccgaccctcccttgccagagacccacggcgctgcccctctacccctgccagcactcccgacatgctttttcgctctgtga

SEQ ID NO: 9888 - RNA, 1062 nt, synthetic construct
  misc_feature 1..1062: note = derived and/or modified sequence opt4 fromKlf1__Homo_sapiens__AFW90650
  source 1..1062: mol_type = other RNA
atggccaccgccgagaccgccctgcccagcatcagcaccctgaccgccctgggccccttccccgacacccaggacgacttcctgaagtggtggagaagcgaggaggcccaggacatgggccccggcccccccgaccccaccgagccccccctgcacgtgaagagcgaggaccagcccggcgaggaggaggacgacgagagaggcgccgacgccacctgggacctggacctgctgctgaccaacttcagcggccccgagcccggcggcgccccccagacctgcgccctggcccccagcgaggccagcggcgcccagtacccccccccccccgagaccctgggcgcctacgccggcggccccggcctggtggccggcctgctgggcagcgaggaccacagcggctgggtgagacccgccctgagagccagagcccccgacgccttcgtgggccccgccctggcccccgcccccgcccccgagcccaaggccctggccctgcagcccgtgtaccccggccccggcgccagaagaagactgctgggctggctgctgcccgccgacagagccttcagcgcctgcggcgtgggcagacccctgagagccaccgtgagagtgcccagagacgtgcccggcgccagcgtgcccagagccctgcccgccctgcccagagcccccggcaccagagccagaagcagacacgtgcccctgctgcccgagctgttcggcaccagagacggcggccactggaccagaggcgactgcagaggcagcagatgcgacagcagagacagagccatccaggccagacccaccttcgtgggcgcccaggaggccggcagcgcccacgtgagagcccccggcctgagacaggagctgcaccaggagctgccccccgagggcgccagcgcccacgcccacagaggcgaggccatcagactgcacgtgggcagactgagactggagatcagagccctgggcagagccgacccccccctgcccgagacccacggcgccgcccccctgcccctgcccgccctgcccacctgcttcttcgccctgtga

SEQ ID NO: 9889 - RNA, 1062 nt, synthetic construct
  misc_feature 1..1062: note = derived and/or modified sequence opt5 fromKlf1__Homo_sapiens__AFW90650
  source 1..1062: mol_type = other RNA
atggccaccgctgagacagccctgcccagcatctccacgctcaccgcgctgggccctttcccggacacacaggacgactttcttaagtggtggagatctgaagaggctcaagatatggggcccggacctcccgaccctaccgaaccccctctgcacgtgaaaagcgaggatcagccgggcgaagaggaggacgatgaacggggagccgacgccacatgggatctcgacctgcttctgaccaacttctccggacccgagcctggcggggctccccagacatgcgccctcgctccttctgaagccagcggagcgcagtatcccccgcctcccgagaccctgggcgcctacgctggcgggcctggactggtcgccggcctcctggggtccgaggatcattctggatgggttcgccccgctcttagagcccgggcgcccgacgcctttgtgggccctgctctggccccggctcccgcccctgaacccaaggccctcgctctgcaacctgtgtaccccgggccgggagcgcgcagacggcttctgggctggctcctgcctgccgatcgcgctttcagcgcctgtggcgtcgggagacccctgcgggccacggtgcgcgttcctagagacgtgcccggagcttccgtccctcgggccctccccgcgctgccgcgcgctcctggcaccagagcccggagccgccacgtgccccttctgcccgagctctttgggacaagagacggaggccattggaccagaggggattgccggggatctcgctgtgactcccgggatagagccattcaggctcgccctacattcgttggcgcccaggaagctggcagcgcccacgtgcgggcgccggggctgagacaggagcttcatcaagaactgccccctgagggagcctctgctcacgcccaccgcggcgaggctatccggctccatgtcgggagactgcgcctggaaattcgggccctcgggagagcggatccccctctgcccgagacccacggcgccgctcctcttcccctgccggccctccctacgtgctttttcgctctgtga

SEQ ID NO: 9890 - RNA, 1062 nt, synthetic construct
  misc_feature 1..1062: note = derived and/or modified sequence opt6 fromKlf1__Homo_sapiens__AFW90650
  source 1..1062: mol_type = other RNA
atggcaacagctgaaactgcactaccatctatatccactttaacagcattaggaccattcccagacacacaagatgattttttaaaatggtggagatcagaagaagcacaagatatgggacctggaccacccgatcccacagaacctcctctacatgtaaaatcagaagaccaaccaggagaagaagaagatgacgaaagaggagcagacgcaacatgggatttagacttattactaactaatttctcaggaccagaaccaggtggtgcaccacaaacatgtgcattggcaccatcagaagcatcaggagcacaatacccaccaccaccagaaacactaggagcatacgctggaggacctggattagtagctggattgttaggatcagaagaccattcaggatgggttagacccgcacttagagctcgagcaccagatgcctttgtaggacctgcacttgcaccagcaccagcacctgaaccaaaagcactagcattacaaccagtgtatccaggaccaggagcaagaagacgattattaggatggttattaccagcagatagagcattttcagcatgtggagtgggaaggcctttaagagctactgtaagagtaccaagagacgtaccaggagcatcagtaccaagagcattaccagcattacctagagcacctggcacaagagcaagaagtcgtcatgtaccattattaccagaattatttggtacaagagatggtggacactggacaagaggagattgtagaggatccagatgtgattcacgagatagagcgatccaagcaagacctacatttgtaggtgcacaagaagctggaagcgcgcatgtaagagcacccggtttaagacaagaattacatcaagaattaccaccagaaggagcatcagcacatgcacatagaggtgaagcaataagattacatgtaggaagattacgattagaaataagagcactaggtagagctgaccctccattaccagaaacacatggggcagcacctttaccactaccagcactaccaacttgtttttttgcactttaa

SEQ ID NO: 9891 - protein, 362 aa, synthetic construct
  REGION 1..362: note = Klf1__Homo_sapiens__Q13351
MATAETALPSISTLTALGPFPDTQDDFLKWWRSEEAQDMGPGPPDPTEPPLHVKSEDQPGEEEDDERGADATWDLDLLLTNFSGPEPGGAPQTCALAPSEASGAQYPPPPETLGAYAGGPGLVAGLLGSEDHSGWVRPALRARAPDAFVGPALAPAPAPEPKALALQPVYPGPGAGSSGGYFPRTGLSVPAASGAPYGLLSGYPAMYPAPQYQGHFQLFRGLQGPAPGPATSPSFLSCLGPGTVGTGLGGTAEDPGVIAETAPSKRGRRSWARKRQAAHTCAHPGCGKSYTKSSHLKAHLRTHTGEKPYACTWEGCGWRFARSDELTRHYRKHTGQRPFRCQLCPRAFSRSDHLALHMKRHL

SEQ ID NO: 9892 - RNA, 1089 nt, synthetic construct
  misc_feature 1..1089: note = Klf1__Homo_sapiens__AAB51173
  source 1..1089: mol_type = other RNA
atggccacagccgagaccgccttgccctccatcagcacactgaccgccctgggccccttcccggacacacaggatgacttcctcaagtggtggcgctccgaagaggcgcaggacatgggcccgggtcctcctgaccccacggagccgcccctccacgtgaagtctgaggaccagcccggggaggaagaggacgatgagaggggcgcggacgccacctgggacctggatctcctcctcaccaacttctcgggcccggagcccggtggcgcgccccagacctgcgctctggcgcccagcgaggcctccggggcgcaatatccgccgccgcccgagactctgggcgcatatgctggcggcccggggctggtggctgggcttttgggttcggaggatcactcgggttgggtgcgccctgccctgcgagcccgggctcccgacgccttcgtgggcccagccctggctccagccccggcccccgagcccaaggcgctggcgctgcaaccggtgtacccggggcccggcgccggctcctcgggtggctacttcccgcggaccgggctttcagtgcctgcggcgtcgggcgccccctacgggctactgtccgggtaccccgcgatgtacccggcgcctcagtaccaagggcacttccagctcttccgcgggctccagggacccgcgcccggtcccgccacgtccccctccttcctgagttgtttgggacccgggacggtgggcactggactcggggggactgcagaggatccaggtgtgatagccgagaccgcgccatccaagcgaggccgacgttcgtgggcgcgcaagaggcaggcagcgcacacgtgcgcgcacccgggttgcggcaagagctacaccaagagctcccacctgaaggcgcatctgcgcacgcacacaggggagaagccatacgcctgcacgtgggaaggctgcggctggagattcgcgcgctcggacgagctgacccgccactaccggaaacacacggggcagcgccccttccgctgccagctctgcccacgtgctttttcgcgctctgaccacctggccttgcacatgaagcgccacctttga

SEQ ID NO: 9893 - RNA, 1089 nt, synthetic construct
  misc_feature 1..1089: note = derived and/or modified sequence opt1 fromKlf1__Homo_sapiens__AAB51173
  source 1..1089: mol_type = other RNA
atggccaccgccgagaccgcgctgcccagcatctccacgctcaccgccctgggcccgttccccgacacccaggacgacttcctgaagtggtggcgcagcgaggaggcccaggacatggggcccgggcccccggaccccaccgagccgcccctccacgtgaagtccgaggaccagcccggcgaggaggaggacgacgagcggggcgccgacgccacgtgggacctggacctgctcctgaccaacttcagcgggcccgagcccggcggcgcgccccagacctgcgccctggccccgtccgaggccagcggggcgcagtacccgcccccgcccgagaccctcggcgcctacgccgggggccccgggctggtcgccggcctgctcggctccgaggaccacagcgggtgggtgcgccccgccctgcgggcgcgcgcccccgacgccttcgtgggccccgccctggcccccgcgcccgcccccgagccgaaggccctcgccctgcagcccgtctaccccgggcccggcgccggctccagcgggggctacttcccgcggacggggctgtccgtgcccgcggccagcggcgccccctacgggctcctgtccggctacccggccatgtaccccgcgccccagtaccagggccacttccagctgttccgcgggctccagggccccgccccggggcccgccaccagcccctccttcctgagctgcctgggccccgggaccgtgggcaccggcctcgggggcacggccgaggacccgggggtcatcgccgagaccgcgccctccaagcggggccgccggagctgggcccgcaagcggcaggccgcccacacgtgcgcccaccccgggtgcggcaagtcctacaccaagagcagccacctgaaggcgcacctccgcacccacaccggcgagaagccctacgcctgcacctgggaggggtgcggctggcggttcgcccgctccgacgagctgacccggcactaccgcaagcacacggggcagcggccgttccgctgccagctgtgcccccgggccttcagccgctccgaccacctggccctccacatgaagcggcacctgtga

SEQ ID NO: 9894 - RNA, 1089 nt, synthetic construct
  misc_feature 1..1089: note = derived and/or modified sequence opt2 fromKlf1__Homo_sapiens__AAB51173
  source 1..1089: mol_type = other RNA
atggccaccgccgagaccgccctcccctccatctccaccctcaccgccctcggccccttccccgacacccaggacgacttcctcaagtggtggcgctccgaggaggcccaggacatgggccccggcccccccgaccccaccgagccccccctccacgtcaagtccgaggaccagcccggcgaggaggaggacgacgagcgcggcgccgacgccacctgggacctcgacctcctcctcaccaacttctccggccccgagcccggcggcgccccccagacctgcgccctcgccccctccgaggcctccggcgcccagtacccccccccccccgagaccctcggcgcctacgccggcggccccggcctcgtcgccggcctcctcggctccgaggaccactccggctgggtccgccccgccctccgcgcccgcgcccccgacgccttcgtcggccccgccctcgcccccgcccccgcccccgagcccaaggccctcgccctccagcccgtctaccccggccccggcgccggctcctccggcggctacttcccccgcaccggcctctccgtccccgccgcctccggcgccccctacggcctcctctccggctaccccgccatgtaccccgccccccagtaccagggccacttccagctcttccgcggcctccagggccccgcccccggccccgccacctccccctccttcctctcctgcctcggccccggcaccgtcggcaccggcctcggcggcaccgccgaggaccccggcgtcatcgccgagaccgccccctccaagcgcggccgccgctcctgggcccgcaagcgccaggccgcccacacctgcgcccaccccggctgcggcaagtcctacaccaagtcctcccacctcaaggcccacctccgcacccacaccggcgagaagccctacgcctgcacctgggagggctgcggctggcgcttcgcccgctccgacgagctcacccgccactaccgcaagcacaccggccagcgccccttccgctgccagctctgcccccgcgccttctcccgctccgaccacctcgccctccacatgaagcgccacctctga

SEQ ID NO: 9895 - RNA, 1089 nt, synthetic construct
  misc_feature 1..1089: note = derived and/or modified sequence opt3 fromKlf1__Homo_sapiens__AAB51173
  source 1..1089: mol_type = other RNA
atggccaccgctgagacagcactgcccagcatctccactctcacggcccttggccctttcccagacacccaggatgactttctgaagtggtggagatctgaagaggcgcaagatatggggccgggaccccctgacccaacagaaccccctttgcacgtgaaatcagaggatcagccaggtgaagaggaggacgatgaaaggggcgctgacgccacttgggatttagacctgctactcaccaacttcagtgggcccgagcctggaggcgcaccacagacatgcgccctggctccgagcgaagcatccggtgcccagtatccccctccacccgagacccttggggcttacgccggaggccctggcctggtcgcggggttgctcggatctgaggatcattcgggttgggttcggccagcactgcgcgcccgagctcccgacgcctttgtgggcccggcactggctcctgcccccgcgccagaacctaaggccctcgcattacaacccgtatacccagggcccggagctggctcaagcggtgggtatttccctcgtactggactgagtgtgccagccgcttccggcgccccgtacggccttttgtctgggtatcccgcaatgtaccctgccccacagtatcagggacactttcagctgttcagaggtctacaaggccccgctcctgggccagcgacaagcccctcctttctctcatgtctgggaccgggcaccgtcggtacggggcttggcggaactgcagaggatcctggcgtgattgccgaaaccgctccaagtaaaagggggcggcgcagctgggccagaaagaggcaggcagcccatacatgcgctcaccccggatgtggtaaatcttacactaagtcctcacatctgaaggcccacttgcggacccacacaggcgagaaaccttacgcatgcacctgggaagggtgtggatggcgcttcgcgcgaagcgacgagctcacgagacattataggaagcacactggccagcggccctttcgttgccagctgtgtccacgcgctttcagtagatctgaccatttagccctgcacatgaaaaggcacctctga

SEQ ID NO: 9896 - RNA, 1089 nt, synthetic construct
  misc_feature 1..1089: note = derived and/or modified sequence opt4 fromKlf1__Homo_sapiens__AAB51173
  source 1..1089: mol_type = other RNA
atggccaccgccgagaccgccctgcccagcatcagcaccctgaccgccctgggccccttccccgacacccaggacgacttcctgaagtggtggagaagcgaggaggcccaggacatgggccccggcccccccgaccccaccgagccccccctgcacgtgaagagcgaggaccagcccggcgaggaggaggacgacgagagaggcgccgacgccacctgggacctggacctgctgctgaccaacttcagcggccccgagcccggcggcgccccccagacctgcgccctggcccccagcgaggccagcggcgcccagtacccccccccccccgagaccctgggcgcctacgccggcggccccggcctggtggccggcctgctgggcagcgaggaccacagcggctgggtgagacccgccctgagagccagagcccccgacgccttcgtgggccccgccctggcccccgcccccgcccccgagcccaaggccctggccctgcagcccgtgtaccccggccccggcgccggcagcagcggcggctacttccccagaaccggcctgagcgtgcccgccgccagcggcgccccctacggcctgctgagcggctaccccgccatgtaccccgccccccagtaccagggccacttccagctgttcagaggcctgcagggccccgcccccggccccgccaccagccccagcttcctgagctgcctgggccccggcaccgtgggcaccggcctgggcggcaccgccgaggaccccggcgtgatcgccgagaccgcccccagcaagagaggcagaagaagctgggccagaaagagacaggccgcccacacctgcgcccaccccggctgcggcaagagctacaccaagagcagccacctgaaggcccacctgagaacccacaccggcgagaagccctacgcctgcacctgggagggctgcggctggagattcgccagaagcgacgagctgaccagacactacagaaagcacaccggccagagacccttcagatgccagctgtgccccagagccttcagcagaagcgaccacctggccctgcacatgaagagacacctgtga

SEQ ID NO: 9897 - RNA, 1089 nt, synthetic construct
  misc_feature 1..1089: note = derived and/or modified sequence opt5 fromKlf1__Homo_sapiens__AAB51173
  source 1..1089: mol_type = other RNA
atggccaccgctgagacagccctgcccagcatctccacgctcaccgcgctgggccctttcccggacacacaggatgactttcttaagtggtggagatctgaagaggctcaagatatggggcccggacctcccgaccctaccgaaccccctctgcacgtgaaaagcgaggatcagccgggcgaagaggaggacgatgaacgcggggccgacgccacatgggatctcgacctgcttctgaccaacttctccggacccgagcctggcggggctccccagacatgcgccctcgctccttctgaagccagcggagcgcagtatcccccgcctcccgagaccctgggcgcctacgctggcgggcctggactggtcgccggcctcctggggtccgaggatcattctggatgggttcggcccgctcttagagcccgggcgcccgacgcctttgtgggccctgctctggccccggctcccgcccctgaacccaaggccctcgctctgcaacctgtgtaccccgggccgggagcgggcagctccggcgggtatttccctcgcacgggacttagcgtccccgccgcttctggcgccccttacgggctgctctccggatatcccgccatgtaccctgctccccagtatcagggccactttcagctgttcagagggctgcaaggaccggcccctggccccgcgaccagcccctcttttctctcctgtctgggccctgggacagtgggaaccggccttgggggaacagctgaggatccgggcgttattgccgaaaccgcccccagcaaacgggggcgcagatcttgggctcggaagcgccaggccgctcatacgtgcgcccaccctggctgtggaaaatcctacacaaagagctcccatctgaaggcgcacctcagaacccacacaggcgagaaaccctacgcctgcacctgggaagggtgtggatggcggttcgctcgctctgacgagctgaccagacattatcggaagcacacaggccagcgcccttttagatgccagctttgtccccgggccttcagcagatccgaccatctggctctccacatgaaacgccacctgtga

SEQ ID NO: 9898 - RNA, 1089 nt, synthetic construct
  misc_feature 1..1089: note = derived and/or modified sequence opt6 fromKlf1__Homo_sapiens__AAB51173
  source 1..1089: mol_type = other RNA
atggcaacagcagaaacagcactaccatctatttcaacacttacagcattaggtccttttccagatacacaagacgattttttaaaatggtggagatcagaagaagctcaagatatgggaccaggaccaccagatccaacagaacctcctctacatgtaaaatcagaagatcaacccggtgaagaagaagatgacgaacgtggagcagacgcaacttgggatcttgacttattattaactaatttttcaggaccagaaccaggaggagcaccacaaacatgcgcattagcaccaagcgaagcttcaggagcacaatatcctccacctccagaaacactcggagcttatgctggtggtccaggattagtagccggtctattaggttcagaagaccattctggttgggtacgaccagcattaagagcaagggcacctgatgcatttgtcggaccagctttagcaccagctccagctccagaaccaaaagcactagcattacaaccagtctatccaggccccggagcaggatcctccggaggttacttccccagaactggattatcagtacccgctgcatcaggagccccatacggattattatcaggatatcctgcaatgtatccagcaccacaatatcaaggtcacttccaattatttaggggacttcaaggacctgctcccggaccagcaacatcaccatcttttttatcatgtcttggaccaggaacagtaggaacaggattaggtggaacagcagaagatccaggagtaatagcagaaacagcaccatctaaaagaggaagaagatcatgggcacgaaaaagacaagctgcacatacatgcgcacatccaggatgtggaaaatcatacacaaaaagctcacatctaaaagcacacttgagaacacatactggtgaaaaaccatatgcatgtacatgggaaggatgtggttggagattcgcaagatctgatgaattaactagacattaccgaaaacatacaggtcaaagaccattcagatgccaattatgtccaagagctttttccagatcagatcatttagcactccatatgaaaagacatttataa

SEQ ID NO: 9899 - protein, 355 aa, synthetic construct
  REGION 1..355: note = Klf2__Homo_sapiens__Q9Y5W3
MALSEPILPSFSTFASPCRERGLQERWPRAEPESGGTDDDLNSVLDFILSMGLDGLGAEAAPEPPPPPPPPAFYYPEPGAPPPYSAPAGGLVSELLRPELDAPLGPALHGRFLLAPPGRLVKAEPPEADGGGGYGCAPGLTRGPRGLKREGAPGPAASCMRGPGGRPPPPPDTPPLSPDGPARLPAPGPRASFPPPFGGPGFGAPGPGLHYAPPAPPAFGLFDDAAAAAAALGLAPPAARGLLTPPASPLELLEAKPKRGRRSWPRKRTATHTCSYAGCGKTYTKSSHLKAHLRTHTGEKPYHCNWDGCGWKFARSDELTRHYRKHTGHRPFQCHLCDRAFSRSDHLALHMKRHM

SEQ ID NO: 9900 - RNA, 1068 nt, synthetic construct
  misc_feature 1..1068: note = Klf2__Homo_sapiens__AAF13295
  source 1..1068: mol_type = other RNA
atggcgctgagtgaacccatcctgccgtccttctccactttcgccagcccgtgccgcgagcgcggcctgcaggagcgctggccgcgcgccgaacccgagtccggcggcaccgacgacgacctcaacagcgtgctggacttcatcctgtccatggggctggatggcctgggcgccgaggccgccccggagccgccgccgccgcccccgccgcctgcgttctattaccccgaacccggcgcgcccccgccctacagcgcccccgcgggtggcctggtgtctgagctgctgcgacccgagctggatgcgccgctggggcccgcactgcacggccgctttctgctggcgccgcccggccgcctggtcaaggccgagccccctgaagcggacggcggcggcggctacggctgcgcccccgggctgacccgtggaccgcgcggcctcaagcgcgagggcgccccgggcccggcggcttcgtgcatgcgaggtcccgggggccgccccccgccgccgcccgacacaccgccgctcagccccgacggccccgcgcgcctgcccgcgcccggtccgcgcgcctccttcccgccgcctttcggtggccctggtttcggcgcgcccgggcccggcctgcattacgcgccgcctgcgcccccagccttcggtctcttcgacgacgcggccgccgccgcggcagccctgggcctggcgccccccgccgcccgcggtctcctcacgccgcctgcgtccccgctggagctgctggaggccaagccaaagcgcggccgccgctcttggccccgcaaacgcaccgccactcacacctgcagctacgcgggctgcggcaagacctacaccaagagttcgcatctgaaggcgcatctgcgcacgcacacaggtgagaagccctaccactgcaactgggacggctgcggctggaagtttgcgcgctcagacgagctcacgcgccactaccgaaagcacacgggccaccggccattccagtgccatctgtgcgatcgtgccttttcgcgctccgatcacctggcgctgcacatgaaacggcacatgtag

SEQ ID NO: 9901 - RNA, 1068 nt, synthetic construct
  misc_feature 1..1068: note = derived and/or modified sequence opt1 fromKlf2__Homo_sapiens__AAF13295
  source 1..1068: mol_type = other RNA
atggccctgagcgagcccatcctcccgtccttcagcaccttcgcctccccctgccgcgagcggggcctgcaggagcgctggccccgggcggagcccgagagcgggggcaccgacgacgacctgaactccgtgctcgacttcatcctgagcatggggctggacggcctcggggccgaggccgccccggagcccccccccccgcccccccccccggccttctactaccccgagcccggcgcgcccccgccctactccgcccccgccggcgggctggtcagcgagctgctccgccccgagctggacgccccgctgggccccgcgctccacgggcggttcctgctggccccccccggccgcctcgtgaaggccgagccgcccgaggccgacgggggcggcgggtacggctgcgcccccgggctgacgcggggcccccgcggcctgaagcgggagggggcgccgggccccgccgcctcctgcatgcgcgggcccggcgggcggccgcccccccccccggacaccccccccctcagccccgacggcccggcccgcctgcccgcccccggcccccgggcgtccttcccgccccccttcgggggccccgggttcggcgccccggggcccggcctgcactacgccccccccgccccgcccgccttcggcctcttcgacgacgcggccgccgccgccgcggccctggggctggccccccccgccgcgcgcggcctcctgaccccgcccgccagccccctggagctcctggaggccaagccgaagcgggggcgccggtcctggccccgcaagcggaccgccacgcacacctgcagctacgccggctgcgggaagacctacaccaagtccagccacctgaaggcgcacctccgcacgcacaccggcgagaagccctaccactgcaactgggacggctgcgggtggaagttcgcccggtccgacgagctgacccgccactaccgcaagcacaccggccaccggcccttccagtgccacctgtgcgaccgcgccttcagccggtccgaccacctcgccctgcacatgaagcgccacatgtga

SEQ ID NO: 9902 - RNA, 1068 nt, synthetic construct
  misc_feature 1..1068: note = derived and/or modified sequence opt2 fromKlf2__Homo_sapiens__AAF13295
  source 1..1068: mol_type = other RNA
atggccctctccgagcccatcctcccctccttctccaccttcgcctccccctgccgcgagcgcggcctccaggagcgctggccccgcgccgagcccgagtccggcggcaccgacgacgacctcaactccgtcctcgacttcatcctctccatgggcctcgacggcctcggcgccgaggccgcccccgagccccccccccccccccccccccccgccttctactaccccgagcccggcgccccccccccctactccgcccccgccggcggcctcgtctccgagctcctccgccccgagctcgacgcccccctcggccccgccctccacggccgcttcctcctcgccccccccggccgcctcgtcaaggccgagccccccgaggccgacggcggcggcggctacggctgcgcccccggcctcacccgcggcccccgcggcctcaagcgcgagggcgcccccggccccgccgcctcctgcatgcgcggccccggcggccgccccccccccccccccgacaccccccccctctcccccgacggccccgcccgcctccccgcccccggcccccgcgcctccttccccccccccttcggcggccccggcttcggcgcccccggccccggcctccactacgccccccccgccccccccgccttcggcctcttcgacgacgccgccgccgccgccgccgccctcggcctcgccccccccgccgcccgcggcctcctcaccccccccgcctcccccctcgagctcctcgaggccaagcccaagcgcggccgccgctcctggccccgcaagcgcaccgccacccacacctgctcctacgccggctgcggcaagacctacaccaagtcctcccacctcaaggcccacctccgcacccacaccggcgagaagccctaccactgcaactgggacggctgcggctggaagttcgcccgctccgacgagctcacccgccactaccgcaagcacaccggccaccgccccttccagtgccacctctgcgaccgcgccttctcccgctccgaccacctcgccctccacatgaagcgccacatgtga

SEQ ID NO: 9903 - RNA, 1068 nt, synthetic construct
  misc_feature 1..1068: note = derived and/or modified sequence opt3 fromKlf2__Homo_sapiens__AAF13295
  source 1..1068: mol_type = other RNA
atggccctgagcgagcccatcctcccttccttctctacctttgcttcaccatgcagagaaaggggccttcaggagcggtggccgcgcgcagaacccgagagtgggggaacagacgatgacctgaacagcgtgttggatttcattttatccatgggtctggacggcctaggggccgaagcggctcctgagccaccccctccaccccctccaccggccttttactatcccgagcctggagcaccacccccttactctgccccagctggcggtctcgtctcggaactgcttcgacccgagctggatgcaccgttggggcctgccctccacggacgtttcctgctggctcccccaggcagactcgttaaggccgaacctcccgaggcggacggcgggggaggttatggctgtgcaccagggttaactaggggaccccggggcctgaaacgcgagggtgcccctgggccagctgcctcatgcatgagaggaccgggcggcaggccccctccaccccctgatacgccaccccttagcccggacgggcctgcacggttgccagctcccggacctcgcgccagttttcccccacctttcggtggccccgggtttggagcgccaggcccgggtctgcattacgcccctcccgcaccacccgctttcgggctatttgatgacgccgctgccgcagccgctgcgctcggcctggcacctccagccgctcgaggacttctgacaccccctgcctccccgttggaactcctggaggcaaagccaaaaagaggcaggcggtcttggccccgtaagcgcaccgccactcacacctgtagctatgctgggtgcggaaaaacatacaccaagtcctcacatttaaaggcccacctgagaactcatacaggtgaaaaaccttatcactgtaattgggatggctgcgggtggaagttcgcaaggagtgacgagctcacccggcactaccgaaaacatacgggacaccgcccatttcaatgtcatctttgcgatagagcgttcagcaggtctgaccacctggctttgcacatgaagcggcatatgtga

SEQ ID NO: 9904 - RNA, 1068 nt, synthetic construct
  misc_feature 1..1068: note = derived and/or modified sequence opt4 fromKlf2__Homo_sapiens__AAF13295
  source 1..1068: mol_type = other RNA
atggccctgagcgagcccatcctgcccagcttcagcaccttcgccagcccctgcagagagagaggcctgcaggagagatggcccagagccgagcccgagagcggcggcaccgacgacgacctgaacagcgtgctggacttcatcctgagcatgggcctggacggcctgggcgccgaggccgcccccgagccccccccccccccccccccccccgccttctactaccccgagcccggcgccccccccccctacagcgcccccgccggcggcctggtgagcgagctgctgagacccgagctggacgcccccctgggccccgccctgcacggcagattcctgctggccccccccggcagactggtgaaggccgagccccccgaggccgacggcggcggcggctacggctgcgcccccggcctgaccagaggccccagaggcctgaagagagagggcgcccccggccccgccgccagctgcatgagaggccccggcggcagacccccccccccccccgacaccccccccctgagccccgacggccccgccagactgcccgcccccggccccagagccagcttccccccccccttcggcggccccggcttcggcgcccccggccccggcctgcactacgccccccccgccccccccgccttcggcctgttcgacgacgccgccgccgccgccgccgccctgggcctggccccccccgccgccagaggcctgctgaccccccccgccagccccctggagctgctggaggccaagcccaagagaggcagaagaagctggcccagaaagagaaccgccacccacacctgcagctacgccggctgcggcaagacctacaccaagagcagccacctgaaggcccacctgagaacccacaccggcgagaagccctaccactgcaactgggacggctgcggctggaagttcgccagaagcgacgagctgaccagacactacagaaagcacaccggccacagacccttccagtgccacctgtgcgacagagccttcagcagaagcgaccacctggccctgcacatgaagagacacatgtga

SEQ ID NO: 9905 - RNA, 1068 nt, synthetic construct
  misc_feature 1..1068: note = derived and/or modified sequence opt5 fromKlf2__Homo_sapiens__AAF13295
  source 1..1068: mol_type = other RNA
atggccctgagcgagcccatcctcccttccttctctacctttgctagcccgtgcagagaacggggcctgcaggagcgctggcccagagccgaacctgagtccgggggaacagacgatgaccttaactctgtgctggatttcattctcagcatgggcctggacgggcttggagcggaagctgcccccgagcctccccctccgccccctccccctgccttttactatcccgagccgggcgctcctcccccttactccgcccccgctgggggactggtctctgaactcctgcggcccgagctggatgcccctctcggcccggcgctgcacggccgcttccttctggctccccctgggagactcgttaaggccgaaccccctgaggccgacggaggcgggggatatggctgtgctcccgggctgacgcggggaccgcgcggccttaaaagagagggcgcccctgggcccgcggccagctgcatgcggggacctggcgggagaccccctcccccgcctgatacccctcccctgtcccccgacggaccggctcgcctccccgcccctggcccccgggctagctttcctccccctttcgggggacccggctttggcgccccggggcctggactgcattacgcccctcccgctcccccggcgttcggcctgtttgatgacgccgctgccgccgctgccgcgctcgggctggctcctcccgccgcccgcggacttctgacacctcccgcttctcccctcgaactgcttgaggccaagcctaaaagaggccggcgctcctggccgagaaagcggaccgctacacacacctgtagctatgccgggtgcggcaaaacatacaccaagtcttcccatctgaaggcgcacctcagaacgcataccggagaaaaaccctatcactgtaattgggatggctgcgggtggaagttcgcccgcagcgacgagctgacacggcactacagaaaacataccggacaccgcccttttcaatgtcatctgtgcgatcgggctttctctagatccgaccacctcgccctgcacatgaagcgccatatgtga

SEQ ID NO: 9906 - RNA, 1068 nt, synthetic construct
  misc_feature 1..1068: note = derived and/or modified sequence opt6 fromKlf2__Homo_sapiens__AAF13295
  source 1..1068: mol_type = other RNA
atggctctaagtgaaccaatattaccaagtttttctacatttgcatcaccatgtagagaaagaggactacaagaaagatggccaagagcagaaccagaatcaggaggaacagatgatgatctaaattctgtattagactttatattatctatgggattagatggattaggagcagaagcagcaccagaacccccaccaccaccacctccaccagctttttactacccagaacctggtgctccaccaccatatagtgcaccagcaggcggattagtatccgaattattaagaccagaacttgacgctccattaggaccagcattacatggaagatttttactagcaccaccaggaagattagtaaaagcagaaccacctgaagcagatggtggaggaggatatggatgtgcaccaggactaacaagaggaccaagaggattaaaaagagaaggagcaccaggacctgcagcatcatgcatgagaggaccaggaggtagaccaccaccaccaccagatacaccaccattaagcccagatggacctgcaagattacctgcacctggacccagagcttcatttccacctccatttggaggaccaggatttggagcacctggtccaggactacattatgctccaccagcacccccagcatttggactttttgacgatgccgctgcagcagcagctgcattaggactagcaccaccagcagcaagaggtttactaacacccccagcaagcccattagaattacttgaagcaaaaccaaaaagaggtagaagatcatggccaagaaaaagaactgcaacacatacatgtagttatgcaggctgtggtaaaacatatacaaaaagttctcacttaaaagcacatttaagaacacatactggagaaaaaccatatcactgtaattgggacggatgcggttggaaatttgctagatcagatgaactaacaagacattatcgaaaacatacaggacatagaccattccaatgtcatttatgtgatagagccttttctagatctgatcatttagcacttcatatgaaaagacatatgtaa

SEQ ID NO: 9907 - protein, 145 aa, synthetic construct [sequence omitted]

SEQ ID NO: 9908 - RNA, 438 nt, synthetic construct
  misc_feature 1..438: note = Klf4__Homo_sapiens__ADL14248
  source 1..438: mol_type = other RNA
atggctgtcagcgacgcgctgctcccatctttctccacgttcgcgtctggcccggcgggaagggagaagacactgcgtcaagcaggtgccccgaataacctcatgccacccggttcctgcatgccagaggagcccaagccaaagaggggaagacgatcgtggccccggaaaaggaccgccacccacacttgtgattacgcgggctgcggcaaaacctacacaaagagttcccatctcaaggcacacctgcgaacccacacaggtgagaaaccttaccactgtgactgggacggctgtggatggaaattcgcccgctcagatgaactgacctggcactaccgtaaacacacggggcaccgcccgttccagtgccaaaaatgcgaccgagcattttccaggtcggaccacctcgccttacacatgaagaggcatttttaa

SEQ ID NO: 9909 - RNA, 438 nt, synthetic construct
  misc_feature 1..438: note = derived and/or modified sequence opt1 fromKlf4__Homo_sapiens__ADL14248
  source 1..438: mol_type = other RNA
atggccgtgagcgacgccctgctcccctccttcagcaccttcgcgtccggcccggccgggcgcgagaagaccctgcggcaggccggcgcccccaacaacctgatgccgcccgggagctgcatgcccgaggagcccaagcccaagcgcggccggcgctcctggccccggaagcgcacggccacccacacgtgcgactacgcggggtgcggcaagacctacaccaagagctcccacctcaaggcccacctccggacccacaccggcgagaagccgtaccactgcgactgggacgggtgcggctggaagttcgcccgcagcgacgagctgacctggcactaccggaagcacacggggcaccgccccttccagtgccagaagtgcgaccgggccttctcccgcagcgaccacctggcgctgcacatgaagcggcacttctga

SEQ ID NO: 9910 - RNA, 438 nt, synthetic construct
  misc_feature 1..438: note = derived and/or modified sequence opt2 fromKlf4__Homo_sapiens__ADL14248
  source 1..438: mol_type = other RNA
atggccgtctccgacgccctcctcccctccttctccaccttcgcctccggccccgccggccgcgagaagaccctccgccaggccggcgcccccaacaacctcatgccccccggctcctgcatgcccgaggagcccaagcccaagcgcggccgccgctcctggccccgcaagcgcaccgccacccacacctgcgactacgccggctgcggcaagacctacaccaagtcctcccacctcaaggcccacctccgcacccacaccggcgagaagccctaccactgcgactgggacggctgcggctggaagttcgcccgctccgacgagctcacctggcactaccgcaagcacaccggccaccgccccttccagtgccagaagtgcgaccgcgccttctcccgctccgaccacctcgccctccacatgaagcgccacttctga

SEQ ID NO: 9911 - RNA, 438 nt, synthetic construct
  misc_feature 1..438: note = derived and/or modified sequence opt3 fromKlf4__Homo_sapiens__ADL14248
  source 1..438: mol_type = other RNA
atggccgtgagcgacgctctgctcccctccttctctacctttgcatcaggccctgccgggagagagaagacacttaggcaggcgggagctccaaacaatctgatgccgcccggtagttgcatgcctgaggaaccaaaacccaagcggggccgccgaagctggcctcgtaaaagaactgccacgcacacctgtgattacgcagggtgcggaaagacatatactaaatcctctcatttgaaggcccacttaaggacccatacaggcgaaaagccataccactgtgactgggatggttgcgggtggaaattcgctcggtcggacgagctgacctggcattatcgcaagcacactggacacagaccctttcaatgtcagaaatgcgatagggcattctcacggagcgaccatctagccctccacatgaagcgccatttttga

SEQ ID NO: 9912 - RNA, 438 nt, synthetic construct
  misc_feature 1..438: note = derived and/or modified sequence opt4 fromKlf4__Homo_sapiens__ADL14248
  source 1..438: mol_type = other RNA
atggccgtgagcgacgccctgctgcccagcttcagcaccttcgccagcggccccgccggcagagagaagaccctgagacaggccggcgcccccaacaacctgatgccccccggcagctgcatgcccgaggagcccaagcccaagagaggcagaagaagctggcccagaaagagaaccgccacccacacctgcgactacgccggctgcggcaagacctacaccaagagcagccacctgaaggcccacctgagaacccacaccggcgagaagccctaccactgcgactgggacggctgcggctggaagttcgccagaagcgacgagctgacctggcactacagaaagcacaccggccacagacccttccagtgccagaagtgcgacagagccttcagcagaagcgaccacctggccctgcacatgaagagacacttctga

SEQ ID NO: 9913 - RNA, 438 nt, synthetic construct
  misc_feature 1..438: note = derived and/or modified sequence opt5 fromKlf4__Homo_sapiens__ADL14248
  source 1..438: mol_type = other RNA
atggccgtgagcgacgctctgctcccctccttctctacctttgccagcggccctgcggggagagagaagacactgcggcaggctggagccccgaacaatcttatgccccctggctcctgcatgcccgaggaacctaaacccaagcgcgggagacggtcttggcctcgcaaaagaacggccacccacacatgtgattacgctggatgcggcaagacctatacaaaaagctcccatctgaaggcccacctccggacccatacaggggaaaagccgtaccactgtgactgggatggatgcggctggaaattcgctcgctctgacgagctgacctggcattatagaaagcacacgggccaccggccctttcaatgtcagaaatgcgatcgcgccttcagcagatccgaccatcttgcgctgcacatgaagcggcatttttga

SEQ ID NO: 9914 - RNA, 438 nt, synthetic construct
  misc_feature 1..438: note = derived and/or modified sequence opt6 fromKlf4__Homo_sapiens__ADL14248
  source 1..438: mol_type = other RNA
atggcagtaagcgatgcattactaccatcatttagcacattcgcaagcggaccagcaggaagagaaaaaacattaagacaagcaggagcaccaaacaacttaatgccaccaggatcatgcatgccagaagaaccaaaaccaaaaagaggaagaagatcatggccaagaaaaagaacagcaacacacacatgtgattacgcaggatgcggaaaaacatacacaaaaagctcacacttaaaagcacacttaagaacacacacaggagaaaaaccataccattgcgattgggatggatgtggatggaaatttgcaagaagcgatgaattaacatggcactatagaaaacacacaggacacagaccattccaatgccaaaaatgtgacagagcatttagcagaagcgatcacttagcattacacatgaaaagacacttttaa

SEQ ID NO: 9915 - protein, 111 aa, synthetic construct
  REGION 1..111: note = Klf4__Homo_sapiens__L0R3V2
MPPGSCMPEEPKPKRGRRSWPRKRTATHTCDYAGCGKTYTKSSHLKAHLRTHTGEKPYHCDWDGCGWKFARSDELTRHYRKHTGHRPFQCQKCDRAFSRSDHLALHMKRHF

SEQ ID NO: 9916 - RNA, 336 nt, synthetic construct
  misc_feature 1..336: note = Klf4__Homo_sapiens__CCO02799
  source 1..336: mol_type = other RNA
atgccacccggttcctgcatgccagaggagcccaagccaaagaggggaagacgatcgtggccccggaaaaggaccgccacccacacttgtgattacgcgggctgcggcaaaacctacacaaagagttcccatctcaaggcacacctgcgaacccacacaggtgagaaaccttaccactgtgactgggacggctgtggatggaaattcgcccgctcagatgaactgaccaggcactaccgtaaacacacggggcaccgcccgttccagtgccaaaaatgcgaccgagcattttccaggtcggaccacctcgccttacacatgaagaggcatttttaa

SEQ ID NO: 9917 - RNA, 336 nt, synthetic construct
  misc_feature 1..336: note = derived and/or modified sequence opt1 fromKlf4__Homo_sapiens__CCO02799
  source 1..336: mol_type = other RNA
atgcccccgggcagctgcatgcccgaggagcccaagcccaagcgcgggcggcgctcctggccgcggaagcgcaccgccacccacacgtgcgactacgccggctgcgggaagacctacaccaagagctcccacctgaaggcgcacctccggacccacacgggcgagaagccctaccactgcgactgggacgggtgcggctggaagttcgcccgcagcgacgagctgacccggcactaccgcaagcacaccggccaccggcccttccagtgccagaagtgcgaccgcgccttctcccggagcgaccacctggccctccacatgaagcgccacttctga

SEQ ID NO: 9918 - RNA, 336 nt, synthetic construct
  misc_feature 1..336: note = derived and/or modified sequence opt2 fromKlf4__Homo_sapiens__CCO02799
  source 1..336: mol_type = other RNA
atgccccccggctcctgcatgcccgaggagcccaagcccaagcgcggccgccgctcctggccccgcaagcgcaccgccacccacacctgcgactacgccggctgcggcaagacctacaccaagtcctcccacctcaaggcccacctccgcacccacaccggcgagaagccctaccactgcgactgggacggctgcggctggaagttcgcccgctccgacgagctcacccgccactaccgcaagcacaccggccaccgccccttccagtgccagaagtgcgaccgcgccttctcccgctccgaccacctcgccctccacatgaagcgccacttctga

SEQ ID NO: 9919 - RNA, 336 nt, synthetic construct
  misc_feature 1..336: note = derived and/or modified sequence opt3 fromKlf4__Homo_sapiens__CCO02799
  source 1..336: mol_type = other RNA
atgccccctggcagctgcatgccagaggaaccgaagcccaaaagagggaggcggtcctggcctcgcaagcgaaccgccacacacacttgtgactacgctggatgcggtaaaacgtataccaagtcttcacatctgaaagcacacctccgtacacatactggcgagaagccataccactgtgattgggacgggtgcggatggaagttcgccagaagtgatgaacttaccaggcattatcggaaacacacaggccaccgcccctttcagtgtcaaaagtgcgacagagcgttcagcaggtccgatcatctggctttgcacatgaaacggcatttttga

SEQ ID NO: 9920 - RNA, 336 nt, synthetic construct
  misc_feature 1..336: note = derived and/or modified sequence opt4 fromKlf4__Homo_sapiens__CCO02799
  source 1..336: mol_type = other RNA
atgccccccggcagctgcatgcccgaggagcccaagcccaagagaggcagaagaagctggcccagaaagagaaccgccacccacacctgcgactacgccggctgcggcaagacctacaccaagagcagccacctgaaggcccacctgagaacccacaccggcgagaagccctaccactgcgactgggacggctgcggctggaagttcgccagaagcgacgagctgaccagacactacagaaagcacaccggccacagacccttccagtgccagaagtgcgacagagccttcagcagaagcgaccacctggccctgcacatgaagagacacttctga

SEQ ID NO: 9921 - RNA, 336 nt, synthetic construct
  misc_feature 1..336: note = derived and/or modified sequence opt5 fromKlf4__Homo_sapiens__CCO02799
  source 1..336: mol_type = other RNA
atgccccctggcagctgcatgccggaggaacccaagcctaaaagagggcggcgctcctggcccagaaagcggaccgccacacacacgtgtgactacgctggatgcggcaaaacctatacaaagtctagccatctgaaagcccacctccgcacccatacaggggagaagccttaccactgtgattgggacggatgcggctggaagttcgcgagatccgatgaactgacccggcattatcgcaaacacacagggcacagaccctttcagtgtcaaaagtgcgaccgggctttctctcgcagcgatcatcttgccctgcacatgaaaagacatttttga

SEQ ID NO: 9922 - RNA, 336 nt, synthetic construct
  misc_feature 1..336: note = derived and/or modified sequence opt6 fromKlf4__Homo_sapiens__CCO02799
  source 1..336: mol_type = other RNA
atgccaccaggatcatgcatgccagaagaaccaaaaccaaaaagaggaagaagatcatggccaagaaaaagaacagcaacacacacatgcgactacgcaggatgcggaaaaacatacacaaaatcatcacacctaaaagcacacctaagaacacacacaggagaaaaaccataccactgcgactgggacggatgcggatggaaattcgcaagatcagacgaactaacaagacactacagaaaacacacaggacacagaccattccaatgccaaaaatgcgacagagcattctcaagatcagaccacctagcactacacatgaaaagacacttctaa

SEQ ID NO: 9923 - protein, 74 aa, synthetic construct
  REGION 1..74: note = Klf5__Homo_sapiens__A0A0A0N0L4
MATRVLSMSARLGPVPQPPAPQDEPVFAQLKPVLGAANPARDAALFPGEELKHAHHRPQAQPAAASRGPGPDKM

SEQ ID NO: 9924 - RNA, 225 nt, synthetic construct
  misc_feature 1..225: note = Klf5__Homo_sapiens__AER93390
  source 1..225: mol_type = other RNA
atggctacaagggtgctgagcatgagcgcccgcctgggacccgtgccccagccgccggcgccgcaggacgagccggtgttcgcgcagctcaagccggtgctgggcgccgcgaatccggcccgcgacgcggcgctcttccccggcgaggagctgaagcacgcgcaccaccgcccgcaggcgcagcccgcggctgcctccagaggacctggtccagacaagatgtga

SEQ ID NO: 9925 - RNA, 225 nt, synthetic construct
  misc_feature 1..225: note = derived and/or modified sequence opt1 fromKlf5__Homo_sapiens__AER93390
  source 1..225: mol_type = other RNA
atggccacccgcgtgctgagcatgtccgcccggctcggccccgtcccgcagccgcccgcgccccaggacgagcccgtgttcgcccagctgaagcccgtgctgggggccgccaaccccgcccgcgacgcggccctcttccccggcgaggagctgaagcacgcccaccaccggccgcaggcccagcccgcggccgccagccgcgggcccggccccgacaagatgtga

SEQ ID NO: 9926 - RNA, 225 nt, synthetic construct
  misc_feature 1..225: note = derived and/or modified sequence opt2 fromKlf5__Homo_sapiens__AER93390
  source 1..225: mol_type = other RNA
atggccacccgcgtcctctccatgtccgcccgcctcggccccgtcccccagccccccgccccccaggacgagcccgtcttcgcccagctcaagcccgtcctcggcgccgccaaccccgcccgcgacgccgccctcttccccggcgaggagctcaagcacgcccaccaccgcccccaggcccagcccgccgccgcctcccgcggccccggccccgacaagatgtga

SEQ ID NO: 9927 - RNA, 225 nt, synthetic construct
  misc_feature 1..225: note = derived and/or modified sequence opt3 fromKlf5__Homo_sapiens__AER93390
  source 1..225: mol_type = other RNA
atggccaccagagtgctgagcatgtccgctaggctcggccccgtccctcagccaccggcaccccaagacgagcctgttttcgcccagcttaagccagtgctgggggcggctaaccccgcccgggatgcagccttgtttcctggagaagagttaaaacacgctcatcaccgcccacaggcacagcccgccgctgcctctcgaggtcctggcccagacaagatgtga

SEQ ID NO: 9928 - RNA, 225 nt, synthetic construct
  misc_feature 1..225: note = derived and/or modified sequence opt4 fromKlf5__Homo_sapiens__AER93390
  source 1..225: mol_type = other RNA
atggccaccagagtgctgagcatgagcgccagactgggccccgtgccccagccccccgccccccaggacgagcccgtgttcgcccagctgaagcccgtgctgggcgccgccaaccccgccagagacgccgccctgttccccggcgaggagctgaagcacgcccaccacagaccccaggcccagcccgccgccgccagcagaggccccggccccgacaagatgtga

SEQ ID NO: 9929 - RNA, 225 nt, synthetic construct
  misc_feature 1..225: note = derived and/or modified sequence opt5 fromKlf5__Homo_sapiens__AER93390
  source 1..225: mol_type = other RNA
atggccaccagagtgctgagcatgtccgctcggctcggccccgtccctcagccgcccgcccctcaagacgagcccgttttcgcgcagctgaagcctgtgcttggggctgccaaccccgcccgcgatgctgccctgtttcctggagaggaactcaaacacgctcatcacagaccgcaggcccagcccgcggccgcttctcggggccctgggcccgacaagatgtga

SEQ ID NO: 9930 - RNA, 225 nt, synthetic construct
  misc_feature 1..225: note = derived and/or modified sequence opt6 fromKlf5__Homo_sapiens__AER93390
  source 1..225: mol_type = other RNA
atggcaacaagagtattaagcatgagcgcaagattaggaccagtaccacaaccaccagcaccacaagacgaaccagtattcgcacaattaaaaccagtattaggagcagcaaatccagcaagagatgcagcactatttccaggagaagaattaaaacacgcacaccatagaccacaagcacaaccagcagcagcatcaagaggaccaggaccagataaaatgtaa

SEQ ID NO: 9931 - protein, 26 aa, synthetic construct
  REGION 1..26: note = Klf5__Homo_sapiens__A0A0A0N0L7
MATRVLSMSARLGPAAASRGPGPDKM

SEQ ID NO: 9932 - RNA, 81 nt, synthetic construct
  misc_feature 1..81: note = Klf5__Homo_sapiens__AER93389
  source 1..81: mol_type = other RNA
atggctacaagggtgctgagcatgagcgcccgcctgggacccgcggctgcctccagaggacctggtccagacaagatgtga

SEQ ID NO: 9933 - RNA, 81 nt, synthetic construct
  misc_feature 1..81: note = derived and/or modified sequence opt1 fromKlf5__Homo_sapiens__AER93389
  source 1..81: mol_type = other RNA
atggccacccgcgtgctgagcatgtccgcccggctcggccccgcggccgccagccgcgggccgggccccgacaagatgtga

SEQ ID NO: 9934 - RNA, 81 nt, synthetic construct
  misc_feature 1..81: note = derived and/or modified sequence opt2 fromKlf5__Homo_sapiens__AER93389
  source 1..81: mol_type = other RNA
atggccacccgcgtcctctccatgtccgcccgcctcggccccgccgccgcctcccgcggccccggccccgacaagatgtga

SEQ ID NO: 9935 - RNA, 81 nt, synthetic construct
  misc_feature 1..81: note = derived and/or modified sequence opt3 fromKlf5__Homo_sapiens__AER93389
  source 1..81: mol_type = other RNA
atggccaccagagtgctgagcatgtccgctaggctcggccccgcagccgcgtctcgggggcctggaccagacaagatgtga

SEQ ID NO: 9936 - RNA, 81 nt, synthetic construct
  misc_feature 1..81: note = derived and/or modified sequence opt4 fromKlf5__Homo_sapiens__AER93389
  source 1..81: mol_type = other RNA
atggccaccagagtgctgagcatgagcgccagactgggccccgccgccgccagcagaggccccggccccgacaagatgtga

SEQ ID NO: 9937 - RNA, 81 nt, synthetic construct
  misc_feature 1..81: note = derived and/or modified sequence opt5 fromKlf5__Homo_sapiens__AER93389
  source 1..81: mol_type = other RNA
atggccaccagagtgctgagcatgtccgctcggctcggccccgccgcggcttctcgcgggcctggaccggacaagatgtga

SEQ ID NO: 9938 - RNA, 81 nt, synthetic construct
  misc_feature 1..81: note = derived and/or modified sequence opt6 fromKlf5__Homo_sapiens__AER93389
  source 1..81: mol_type = other RNA
atggcaacaagagtattaagcatgagcgcaagattaggaccagcagcagcatcaagaggaccaggaccagataaaatgtaa

SEQ ID NO: 9939 - protein, 450 aa, synthetic construct
  REGION 1..450: note = Klf5__Homo_sapiens__A0A0A0N0M4
MATRVLSMSARLGPVPQPPAPQDEPVFAQLKPVLGAANPARDAALFPGEELKHAHHRPQAPQPAQPPATGPRLPPEDLVQTRCEMEKYLTPQLPPVPIIPEHKKYRRDSASVVDQFFTDTEGLPYSINMNVFLPDITHLRTGLYKSQRPCVTHIKTEPVAIFSHQSETTAPPPAPTQALPEFTSIFSSHQTAAPEVNNIFIKQELPTPDLHLSVPTQQGHLYQLLNTPDLDMPSSTNQTAAMDTLNVSMSAAMAGLNTHTSAVPQTAVKQFQGMPPCTYTMPSQFLPQQATYFPPSPPSSEPGSPDRQAEMLQNLTPPPSYAATIASKLAIHNPNLPTTLPVNSQNIQPVRYNRRSNPDLEKRRIHYCDYPGCTKVYTKSSHLKAHLRTHTGEKPYKCTWEGCDWRFARSDELTRHYRKHTGAKPFQCGVCNRSFSRSDHLALHMKRHQN

SEQ ID NO: 9940 - RNA, 1353 nt, synthetic construct
  misc_feature 1..1353: note = Klf5__Homo_sapiens__AER93391
  source 1..1353: mol_type = other RNA
atggctacaagggtgctgagcatgagcgcccgcctgggacccgtgccccagccgccggcgccgcaggacgagccggtgttcgcgcagctcaagccggtgctgggcgccgcgaatccggcccgcgacgcggcgctcttccccggcgaggagctgaagcacgcgcaccaccgcccgcaggccccgcagccggcccagccgcccgccaccggcccgcggctgcctccagaggacctggtccagacaagatgtgaaatggagaagtatctgacacctcagcttcctccagttcctataattccagagcataaaaagtatagacgagacagtgcctcagtcgtagaccagttcttcactgacactgaagggttaccttacagtatcaacatgaacgtcttcctccctgacatcactcacctgagaactggcctctacaaatcccagagaccgtgcgtaacacacatcaagacagaacctgttgccattttcagccaccagagtgaaacgactgcccctcctccggccccgacccaggccctccctgagttcaccagtatattcagctcacaccagaccgcagctccagaggtgaacaatattttcatcaaacaagaacttcctacaccagatcttcatctttctgtccctacccagcagggccacctgtaccagctactgaatacaccggatctagatatgcccagttctacaaatcagacagcagcaatggacactcttaatgtttctatgtcagctgccatggcaggccttaacacacacacctctgctgttccgcagactgcagtgaaacaattccagggcatgcccccttgcacatacacaatgccaagtcagtttcttccacaacaggccacttactttcccccgtcaccaccaagctcagagcctggaagtccagatagacaagcagagatgctccagaatttaaccccacctccatcctatgctgctacaattgcttctaaactggcaattcacaatccaaatttacccaccaccctgccagttaactcacaaaacatccaacctgtcagatacaatagaaggagtaaccccgatttggagaaacgacgcatccactactgcgattaccctggttgcacaaaagtttataccaagtcttctcatttaaaagctcacctgaggactcacactggtgaaaagccatacaagtgtacctgggaaggctgcgactggaggttcgcgcgatcggatgagctgacccgccactaccggaagcacacaggcgccaagcccttccagtgcggggtgtgcaaccgcagcttctcgcgctctgaccacctggccctgcatatgaagaggcaccagaactga

SEQ ID NO: 9941 - RNA, 1353 nt, synthetic construct
  misc_feature 1..1353: note = derived and/or modified sequence opt1 fromKlf5__Homo_sapiens__AER93391
  source 1..1353: mol_type = other RNA
atggccacccgcgtgctgagcatgtccgcccggctcggccccgtcccgcagccgcccgcgccccaggacgagcccgtgttcgcccagctgaagcccgtgctgggggccgccaaccccgcccgcgacgcggccctcttccccggcgaggagctgaagcacgcccaccaccggccgcaggcgccccagcccgcccagcccccggccaccgggccccgcctgccgcccgaggacctcgtccagacgcggtgcgagatggagaagtacctgacgccccagctgccgcccgtgcccatcatccccgagcacaagaagtaccgccgggacagcgcctccgtggtcgaccagttcttcaccgacaccgagggcctcccctacagcatcaacatgaacgtgttcctgcccgacatcacccacctccgcaccgggctgtacaagtcccagcggccctgcgtgacccacatcaagaccgagccggtcgccatcttcagccaccagtccgagacgaccgccccgccgcccgcgcccacccaggccctgcccgagttcaccagcatcttctccagccaccagacggccgcccccgaggtgaacaacatcttcatcaagcaggagctgcccacccccgacctccacctgtccgtgcccacccagcagggccacctgtaccagctcctgaacacccccgacctggacatgccgagctccacgaaccagaccgccgcgatggacaccctcaacgtcagcatgtccgccgccatggccggcctgaacacccacacgagcgccgtgccccagaccgcggtgaagcagttccaggggatgccgccctgcacctacaccatgccctcccagttcctgccccagcaggccacgtacttcccgcccagcccgccctccagcgagcccggcagccccgaccgccaggccgagatgctccagaacctgacgcccccgccctcctacgccgccaccatcgcgagcaagctggccatccacaaccccaacctccccaccaccctgcccgtcaactcccagaacatccagcccgtgcggtacaaccgccggagcaaccccgacctggagaagcgccggatccactactgcgactacccggggtgcaccaaggtgtacaccaagtccagccacctcaaggcccacctccgcacccacacgggcgagaagccctacaagtgcacctgggaggggtgcgactggcggttcgcccgctccgacgagctgacccggcactaccgcaagcacaccggcgcgaagcccttccagtgcggcgtctgcaaccggagcttctcccgcagcgaccacctggccctgcacatgaagcgccaccagaactga

SEQ ID NO: 9942 - RNA, 1353 nt, synthetic construct
  misc_feature 1..1353: note = derived and/or modified sequence opt2 fromKlf5__Homo_sapiens__AER93391
  source 1..1353: mol_type = other RNA
atggccacccgcgtcctctccatgtccgcccgcctcggccccgtcccccagccccccgccccccaggacgagcccgtcttcgcccagctcaagcccgtcctcggcgccgccaaccccgcccgcgacgccgccctcttccccggcgaggagctcaagcacgcccaccaccgcccccaggccccccagcccgcccagccccccgccaccggcccccgcctcccccccgaggacctcgtccagacccgctgcgagatggagaagtacctcaccccccagctcccccccgtccccatcatccccgagcacaagaagtaccgccgcgactccgcctccgtcgtcgaccagttcttcaccgacaccgagggcctcccctactccatcaacatgaacgtcttcctccccgacatcacccacctccgcaccggcctctacaagtcccagcgcccctgcgtcacccacatcaagaccgagcccgtcgccatcttctcccaccagtccgagaccaccgcccccccccccgcccccacccaggccctccccgagttcacctccatcttctcctcccaccagaccgccgcccccgaggtcaacaacatcttcatcaagcaggagctccccacccccgacctccacctctccgtccccacccagcagggccacctctaccagctcctcaacacccccgacctcgacatgccctcctccaccaaccagaccgccgccatggacaccctcaacgtctccatgtccgccgccatggccggcctcaacacccacacctccgccgtcccccagaccgccgtcaagcagttccagggcatgcccccctgcacctacaccatgccctcccagttcctcccccagcaggccacctacttccccccctcccccccctcctccgagcccggctcccccgaccgccaggccgagatgctccagaacctcaccccccccccctcctacgccgccaccatcgcctccaagctcgccatccacaaccccaacctccccaccaccctccccgtcaactcccagaacatccagcccgtccgctacaaccgccgctccaaccccgacctcgagaagcgccgcatccactactgcgactaccccggctgcaccaaggtctacaccaagtcctcccacctcaaggcccacctccgcacccacaccggcgagaagccctacaagtgcacctgggagggctgcgactggcgcttcgcccgctccgacgagctcacccgccactaccgcaagcacaccggcgccaagcccttccagtgcggcgtctgcaaccgctccttctcccgctccgaccacctcgccctccacatgaagcgccaccagaactga

SEQ ID NO: 9943 - RNA, 1353 nt, synthetic construct
  misc_feature 1..1353: note = derived and/or modified sequence opt3 fromKlf5__Homo_sapiens__AER93391
  source 1..1353: mol_type = other RNA
atggccaccagagtgctgagcatgtccgctaggctcggccccgtccctcagccaccggcaccccaagacgagcctgttttcgcccagcttaagccagtgctgggggcggctaaccccgcccgggatgcagccttgtttcctggagaagagttaaaacacgctcatcaccgcccacaggcaccccagcctgcccaaccaccggctacaggtccccgactgcctccagaagacctagtacagactcgttgcgagatggaaaagtacctcacgccccagctgcctccagtgcccatcattccggagcataaaaagtatagaagggattctgcctcagtcgtggaccagttctttaccgatacagagggccttccttacagtataaatatgaacgttttcctgcccgacatcactcacttgcggaccgggctctataaaagccaacgcccatgtgtgacacatattaagaccgaacctgtcgcgatcttttcccaccagtctgagactacagcacccccacccgcccctacccaggctctgccagagttcacgtcgatttttagcagccaccagactgccgcaccggaagtgaataacatcttcataaagcaagagctgcccacccctgatctccatttaagtgtaccaacacagcagggacacctgtaccaacttttgaatactcccgacctggatatgccttcctctaccaaccagacagctgccatggacaccctaaatgttagcatgtccgcggccatggcaggcctcaacacgcatacttcagctgtgccacagacagccgtcaaacagtttcaaggtatgcccccgtgcacctatactatgcctagtcagttcctgccacagcaggctacatactttcccccttcacccccatcttccgaacctgggtcacccgatagacaagccgagatgcttcagaatctgaccccaccgcctagctatgcagccacgatcgctagtaagttggcgattcacaaccccaatctcccaaccacactgcccgtgaactctcagaatatccagcctgtgaggtacaaccggcgctccaatccagacttagaaaaacgaaggattcactactgtgattatcccggatgcactaaggtctacaccaaaagctcgcatctgaaggcacacctcagaacacatactggcgagaagccttataaatgtacctgggaaggctgcgactggcggttcgcccgttctgacgagcttacacgccactacagaaagcataccggggctaaaccgtttcaatgtggagtttgcaacaggtccttctcacggagtgatcacctggccttgcacatgaagcgacatcagaactga

SEQ ID NO: 9944 - RNA, 1353 nt, synthetic construct
  misc_feature 1..1353: note = derived and/or modified sequence opt4 fromKlf5__Homo_sapiens__AER93391
  source 1..1353: mol_type = other RNA
atggccaccagagtgctgagcatgagcgccagactgggccccgtgccccagccccccgccccccaggacgagcccgtgttcgcccagctgaagcccgtgctgggcgccgccaaccccgccagagacgccgccctgttccccggcgaggagctgaagcacgcccaccacagaccccaggccccccagcccgcccagccccccgccaccggccccagactgccccccgaggacctggtgcagaccagatgcgagatggagaagtacctgaccccccagctgccccccgtgcccatcatccccgagcacaagaagtacagaagagacagcgccagcgtggtggaccagttcttcaccgacaccgagggcctgccctacagcatcaacatgaacgtgttcctgcccgacatcacccacctgagaaccggcctgtacaagagccagagaccctgcgtgacccacatcaagaccgagcccgtggccatcttcagccaccagagcgagaccaccgcccccccccccgcccccacccaggccctgcccgagttcaccagcatcttcagcagccaccagaccgccgcccccgaggtgaacaacatcttcatcaagcaggagctgcccacccccgacctgcacctgagcgtgcccacccagcagggccacctgtaccagctgctgaacacccccgacctggacatgcccagcagcaccaaccagaccgccgccatggacaccctgaacgtgagcatgagcgccgccatggccggcctgaacacccacaccagcgccgtgccccagaccgccgtgaagcagttccagggcatgcccccctgcacctacaccatgcccagccagttcctgccccagcaggccacctacttcccccccagcccccccagcagcgagcccggcagccccgacagacaggccgagatgctgcagaacctgacccccccccccagctacgccgccaccatcgccagcaagctggccatccacaaccccaacctgcccaccaccctgcccgtgaacagccagaacatccagcccgtgagatacaacagaagaagcaaccccgacctggagaagagaagaatccactactgcgactaccccggctgcaccaaggtgtacaccaagagcagccacctgaaggcccacctgagaacccacaccggcgagaagccctacaagtgcacctgggagggctgcgactggagattcgccagaagcgacgagctgaccagacactacagaaagcacaccggcgccaagcccttccagtgcggcgtgtgcaacagaagcttcagcagaagcgaccacctggccctgcacatgaagagacaccagaactga

SEQ ID NO: 9945 - RNA, 1353 nt, synthetic construct
  misc_feature 1..1353: note = derived and/or modified sequence opt5 fromKlf5__Homo_sapiens__AER93391
  source 1..1353: mol_type = other RNA
atggccaccagagtgctgagcatgtccgctcggctcggccccgtccctcagccgcccgcccctcaagacgagcccgttttcgcgcagctgaagcctgtgcttggggctgccaaccccgcccgcgatgctgccctgtttcctggagaagaactcaaacacgctcatcacagaccgcaggcgccccagcctgcccaaccccctgccacaggcccccggctgccgcctgaagaccttgtgcagacgcgctgcgagatggaaaagtacctgacaccccagctccctcccgtccccatcattcctgagcataaaaagtatagacgggattctgctagcgtggttgaccagttctttaccgataccgaggggctgccgtactccatcaatatgaacgtgttcctgcccgacattacacacctccgcaccggactgtataaatctcaaagaccttgtgtcacacatatcaagaccgaacccgtggccatttttagccaccagtccgagacgaccgctcctcccccggcccctacacaggcgcttcccgagttcacctctatctttagctcccaccagacagccgctcctgaggttaataacatcttcattaagcaagagctgcccacccctgatctccatctgagcgtgcccacgcagcagggccacctttaccaactgctcaatacaccggacctggatatgccttcttccaccaaccagacagccgctatggacaccctgaatgtcagcatgtctgccgccatggctgggctcaacacccatacatccgcggtgccccagacggccgtgaaacagtttcaaggaatgcccccttgcacctatacaatgccgagccagttcctgccccagcaggctacctactttcctccctctcctccctccagcgaacctggctcccccgatcggcaagccgagatgcttcagaatctgacaccgcctccctcttatgccgctaccatcgccagcaagctcgcgattcacaaccctaatctgcccacgacacttccggtcaactcccagaatatccagcctgttcgctacaacagacggagcaatcccgacctggaaaaacgccggattcactactgtgattatcctggctgcaccaaggtgtacaccaaatcttcccatctcaaggctcacctgagaacacataccggggagaagccctataaatgtacatgggaaggatgcgactggcgcttcgccagaagcgacgagctgacgcggcactacagaaagcataccggcgccaaaccctttcaatgtggggtgtgcaaccgctctttcagccggtccgatcacctcgctctgcacatgaagagacatcagaactga

SEQ ID NO: 9946 - RNA, 1353 nt, synthetic construct
  misc_feature 1..1353: note = derived and/or modified sequence opt6 fromKlf5__Homo_sapiens__AER93391
  source 1..1353: mol_type = other RNA
atggcaactagagtactatctatgtcagcacgactaggtccagtacctcaaccacctgcaccccaagatgaacccgtatttgcccaattaaaaccagtattaggagcagcaaaccctgcaagagacgcagcactattcccaggagaagaactaaaacacgcacaccatcgaccacaagcaccacaacctgcacaaccccccgcaacaggaccaagacttccaccagaagatttagtacaaacaagatgtgaaatggaaaagtatctaacaccacaactaccaccagtaccaataataccagaacacaaaaaatacagaagagactcagcatcagtagtcgatcaattctttacagacacagaaggattaccatactcaataaacatgaacgtatttttaccagacataacacaccttagaacaggactctacaaatcacaacgaccatgtgtaacccacataaaaacagaaccagttgcaatattctcccaccaatcagaaacaaccgcacccccaccagccccaacccaagccctaccagaattcacatcaatattctcttcacatcaaactgcagcaccagaagtaaacaacatattcataaaacaagaactacccacacctgatttacatctaagtgtacccacacaacaaggacacctatatcaattactcaacacaccagacctcgatatgccatcatcaactaatcaaactgcagcaatggacacactcaacgtttcaatgtcagcagccatggctggtcttaacacccatacatcagcggtaccccaaacagcagtaaaacaatttcaaggaatgccaccatgcacatacacaatgccatctcaatttctaccccaacaagctacatacttccccccatcaccaccatcctcagaaccaggatcaccagaccgacaagccgaaatgttacagaatctaactccaccaccatcatacgcagcaacaatcgcctcaaaacttgcaatacataaccccaacctacctactacattacccgtcaactcacaaaacatccaaccagtccgatacaacagaagatcaaatcctgacctagaaaaaagacgcatacactattgcgactaccccggctgcaccaaagtatacacaaaatcttcccaccttaaagcacacttaagaacacacaccggagaaaaaccatataaatgcacatgggaaggatgcgactggagatttgcacgatccgacgaactaactcgtcattacagaaaacatactggcgccaaaccctttcaatgcggagtatgcaaccgatccttctcaagatcagatcatctagcattacacatgaaaagacaccaaaactaa

SEQ ID NO: 9947 - protein, 457 aa, synthetic construct
  REGION 1..457: note = Klf5__Homo_sapiens__Q13887
MATRVLSMSARLGPVPQPPAPQDEPVFAQLKPVLGAANPARDAALFPGEELKHAHHRPQAQPAPAQAPQPAQPPATGPRLPPEDLVQTRCEMEKYLTPQLPPVPIIPEHKKYRRDSASVVDQFFTDTEGLPYSINMNVFLPDITHLRTGLYKSQRPCVTHIKTEPVAIFSHQSETTAPPPAPTQALPEFTSIFSSHQTAAPEVNNIFIKQELPTPDLHLSVPTQQGHLYQLLNTPDLDMPSSTNQTAAMDTLNVSMSAAMAGLNTHTSAVPQTAVKQFQGMPPCTYTMPSQFLPQQATYFPPSPPSSEPGSPDRQAEMLQNLTPPPSYAATIASKLAIHNPNLPTTLPVNSQNIQPVRYNRRSNPDLEKRRIHYCDYPGCTKVYTKSSHLKAHLRTHTGEKPYKCTWEGCDWRFARSDELTRHYRKHTGAKPFQCGVCNRSFSRSDHLALHMKRHQN

SEQ ID NO: 9948 - RNA, 1374 nt, synthetic construct
  misc_feature 1..1374: note = Klf5__Homo_sapiens__AAF18307
  source 1..1374: mol_type = other RNA
atggctacaagggtgctgagcatgagcgcccgcctgggacccgtgccccagccgccggcgccgcaggacgagccggtgttcgcgcagctcaagccggtgctgggcgccgcgaatccggcccgcgacgcggcgctcttccccggcgaggagctgaagcacgcgcaccaccgcccgcaggcgcagcccgcgcccgcgcaggccccgcagccggcccagccgcccgccaccggcccgcggctgcctccagaggacctggtccaaacaagatgtgaaatggagaagtatctgacacctcagcttcctccagttcctataattccagagcataaaaagtatagacgagacagtgcctcagtcgtagaccagttcttcactgacactgaagggttaccttacagtatcaacatgaacgtcttcctccctgacatcactcacctgagaactggcctctacaaatcccagagaccgtgcgtaacacacatcaagacagaacctgttgccattttcagccaccagagtgaaacgactgcccctcctccggccccgacccaggccctccctgagttcaccagtatattcagctcacaccagaccgcagctccagaggtgaacaatattttcatcaaacaagaacttcctacaccagatcttcatctttctgtccctacccagcagggccacctgtaccagctactgaatacaccggatctagatatgcccagttctacaaatcagacagcagcaatggacactcttaatgtttctatgtcagctgccatggcaggccttaacacacacacctctgctgttccgcagactgcagtgaaacaattccagggcatgcccccttgcacatacacaatgccaagtcagtttcttccacaacaggccacttactttcccccgtcaccaccaagctcagagcctggaagtccagatagacaagcagagatgctccagaatttaaccccacctccatcctatgctgctacaattgcttctaaactggcaattcacaatccaaatttacccaccaccctgccagttaactcacaaaacatccaacctgtcagatacaatagaaggagtaaccccgatttggagaaacgacgcatccactactgcgattaccctggttgcacaaaagtttataccaagtcttctcatttaaaagctcacctgaggactcacactggtgaaaagccatacaagtgtacctgggaaggctgcgactggaggttcgcgcgatcggatgagctgacccgccactaccggaagcacacaggcgccaagcccttccagtgcggggtgtgcaaccgcagcttctcgcgctctgaccacctggccctgcatatgaagaggcaccagaactga

SEQ ID NO: 9949 - RNA, 1374 nt, synthetic construct
  misc_feature 1..1374: note = derived and/or modified sequence opt1 fromKlf5__Homo_sapiens__AAF18307
  source 1..1374: mol_type = other RNA
atggccacccgcgtgctgagcatgtccgcccggctcggccccgtcccgcagccgcccgcgccccaggacgagcccgtgttcgcccagctgaagcccgtgctgggggccgccaaccccgcccgcgacgcggccctcttccccggcgaggagctgaagcacgcccaccaccggccgcaggcccagcccgcgcccgcccaggcgccccagccggcccagccgcccgccaccgggccccgcctgccgcccgaggacctcgtccagacgcggtgcgagatggagaagtacctgacgccccagctgccgcccgtgcccatcatccccgagcacaagaagtaccgccgggacagcgcctccgtggtcgaccagttcttcaccgacaccgagggcctcccctacagcatcaacatgaacgtgttcctgcccgacatcacccacctccgcaccgggctgtacaagtcccagcggccctgcgtgacccacatcaagaccgagcccgtcgccatcttcagccaccagtccgagacgaccgcgcccccgcccgcccccacccaggccctgccggagttcaccagcatcttctccagccaccagacggccgcccccgaggtgaacaacatcttcatcaagcaggagctgcccacccccgacctccacctgtccgtgccgacccagcagggccacctgtaccagctcctgaacacccccgacctggacatgcccagctccacgaaccagaccgccgccatggacaccctcaacgtcagcatgtccgccgcgatggccggcctgaacacccacacgagcgccgtgccccagaccgccgtgaagcagttccaggggatgccgccctgcacctacaccatgccctcccagttcctgccccagcaggccacgtacttcccgcccagcccgccctccagcgagcccggcagccccgaccgccaggcggagatgctccagaacctgaccccgccgccctcctacgccgccaccatcgccagcaagctggcgatccacaaccccaacctccccaccacgctgcccgtcaactcccagaacatccagcccgtgcggtacaaccgccggagcaaccccgacctggagaagcgccggatccactactgcgactaccccgggtgcaccaaggtgtacaccaagtccagccacctcaaggcccacctccgcacccacacgggcgagaagccgtacaagtgcacctgggaggggtgcgactggcggttcgcccgctccgacgagctgacccggcactaccgcaagcacaccggcgccaagcccttccagtgcggcgtctgcaaccggagcttctcccgcagcgaccacctggccctgcacatgaagcgccaccagaactga

SEQ ID NO: 9950 - RNA, 1374 nt, synthetic construct
  misc_feature 1..1374: note = derived and/or modified sequence opt2 fromKlf5__Homo_sapiens__AAF18307
  source 1..1374: mol_type = other RNA
atggccacccgcgtcctctccatgtccgcccgcctcggccccgtcccccagccccccgccccccaggacgagcccgtcttcgcccagctcaagcccgtcctcggcgccgccaaccccgcccgcgacgccgccctcttccccggcgaggagctcaagcacgcccaccaccgcccccaggcccagcccgcccccgcccaggccccccagcccgcccagccccccgccaccggcccccgcctcccccccgaggacctcgtccagacccgctgcgagatggagaagtacctcaccccccagctcccccccgtccccatcatccccgagcacaagaagtaccgccgcgactccgcctccgtcgtcgaccagttcttcaccgacaccgagggcctcccctactccatcaacatgaacgtcttcctccccgacatcacccacctccgcaccggcctctacaagtcccagcgcccctgcgtcacccacatcaagaccgagcccgtcgccatcttctcccaccagtccgagaccaccgcccccccccccgcccccacccaggccctccccgagttcacctccatcttctcctcccaccagaccgccgcccccgaggtcaacaacatcttcatcaagcaggagctccccacccccgacctccacctctccgtccccacccagcagggccacctctaccagctcctcaacacccccgacctcgacatgccctcctccaccaaccagaccgccgccatggacaccctcaacgtctccatgtccgccgccatggccggcctcaacacccacacctccgccgtcccccagaccgccgtcaagcagttccagggcatgcccccctgcacctacaccatgccctcccagttcctcccccagcaggccacctacttccccccctcccccccctcctccgagcccggctcccccgaccgccaggccgagatgctccagaacctcaccccccccccctcctacgccgccaccatcgcctccaagctcgccatccacaaccccaacctccccaccaccctccccgtcaactcccagaacatccagcccgtccgctacaaccgccgctccaaccccgacctcgagaagcgccgcatccactactgcgactaccccggctgcaccaaggtctacaccaagtcctcccacctcaaggcccacctccgcacccacaccggcgagaagccctacaagtgcacctgggagggctgcgactggcgcttcgcccgctccgacgagctcacccgccactaccgcaagcacaccggcgccaagcccttccagtgcggcgtctgcaaccgctccttctcccgctccgaccacctcgccctccacatgaagcgccaccagaactga

SEQ ID NO: 9951 - RNA, 1374 nt, synthetic construct
  misc_feature 1..1374: note = derived and/or modified sequence opt3 fromKlf5__Homo_sapiens__AAF18307
  source 1..1374: mol_type = other RNA
atggccaccagagtgctgagcatgtccgctaggctcggccccgtccctcagccaccggcaccccaagacgagcctgttttcgcccagcttaagccagtgctgggggcggctaaccccgcccgggatgcagccttgtttcctggagaagagttaaaacacgctcatcaccgcccacaggcacagcccgcccctgctcaagccccacagccggcgcagccccctgcaacaggtccacgactgccccctgaagacctagtacagactcgttgcgagatggaaaagtacctcacgccacaactgcccccggtgcctatcattcccgagcataaaaagtatagaagggattctgcctcagtcgtggaccagttctttaccgatacagagggccttccatacagtataaatatgaacgttttcctgcctgacatcactcacttgcggaccgggctctataaaagccagcgcccctgtgtgacacatattaagaccgaaccagtcgctatcttttcccaccagtctgagactacagcaccccctccagccccgacccaagctctgcccgaatttacgtcgattttctcaagccaccagactgccgcgcctgaggtgaataacatcttcataaagcaggagctgccaacccccgatctccatttaagtgtacctacacaacagggacacctgtaccagcttttgaatactccagacctggatatgccctcctctaccaaccagacagccgcaatggacaccctaaatgttagcatgtccgctgccatggctggcctcaacacgcatacttcagccgtgccgcaaacagcagtcaaacagtttcagggtatgcctccatgcacctatactatgcccagtcagttcctgcctcaacaggccacatactttcccccaagccctccctcttccgaaccagggtcaccggatagacaggctgagatgcttcagaatctgacccctcccccaagctatgcggcaacgatcgccagtaagttggctattcacaaccccaatctccctaccacactgccagtgaactctcaaaatatccagcccgtgaggtacaaccggcgctccaatcctgacttagaaaaacgaaggattcactactgtgattatccgggatgcactaaggtctacaccaaaagctcgcatctgaaggcccacctcagaacacatactggcgagaagccatataaatgtacctgggaaggctgcgactggcggttcgcacgttctgacgagcttacacgccactacagaaagcataccggggccaaaccctttcagtgtggagtttgcaacaggtccttctcacggagtgatcacctggctttgcacatgaagcgacatcagaactga

SEQ ID NO: 9952 - RNA, 1374 nt, synthetic construct
  misc_feature 1..1374: note = derived and/or modified sequence opt4 fromKlf5__Homo_sapiens__AAF18307
  source 1..1374: mol_type = other RNA
atggccaccagagtgctgagcatgagcgccagactgggccccgtgccccagccccccgccccccaggacgagcccgtgttcgcccagctgaagcccgtgctgggcgccgccaaccccgccagagacgccgccctgttccccggcgaggagctgaagcacgcccaccacagaccccaggcccagcccgcccccgcccaggccccccagcccgcccagccccccgccaccggccccagactgccccccgaggacctggtgcagaccagatgcgagatggagaagtacctgaccccccagctgccccccgtgcccatcatccccgagcacaagaagtacagaagagacagcgccagcgtggtggaccagttcttcaccgacaccgagggcctgccctacagcatcaacatgaacgtgttcctgcccgacatcacccacctgagaaccggcctgtacaagagccagagaccctgcgtgacccacatcaagaccgagcccgtggccatcttcagccaccagagcgagaccaccgcccccccccccgcccccacccaggccctgcccgagttcaccagcatcttcagcagccaccagaccgccgcccccgaggtgaacaacatcttcatcaagcaggagctgcccacccccgacctgcacctgagcgtgcccacccagcagggccacctgtaccagctgctgaacacccccgacctggacatgcccagcagcaccaaccagaccgccgccatggacaccctgaacgtgagcatgagcgccgccatggccggcctgaacacccacaccagcgccgtgccccagaccgccgtgaagcagttccagggcatgcccccctgcacctacaccatgcccagccagttcctgccccagcaggccacctacttcccccccagcccccccagcagcgagcccggcagccccgacagacaggccgagatgctgcagaacctgacccccccccccagctacgccgccaccatcgccagcaagctggccatccacaaccccaacctgcccaccaccctgcccgtgaacagccagaacatccagcccgtgagatacaacagaagaagcaaccccgacctggagaagagaagaatccactactgcgactaccccggctgcaccaaggtgtacaccaagagcagccacctgaaggcccacctgagaacccacaccggcgagaagccctacaagtgcacctgggagggctgcgactggagattcgccagaagcgacgagctgaccagacactacagaaagcacaccggcgccaagcccttccagtgcggcgtgtgcaacagaagcttcagcagaagcgaccacctggccctgcacatgaagagacaccagaactga

SEQ ID NO: 9953 - RNA, 1374 nt, synthetic construct
  misc_feature 1..1374: note = derived and/or modified sequence opt5 fromKlf5__Homo_sapiens__AAF18307
  source 1..1374: mol_type = other RNA
atggccaccagagtgctgagcatgtccgctcggctcggccccgtccctcagccgcccgcccctcaagacgagcccgttttcgcgcagctgaagcctgtgcttggggctgccaaccccgcccgcgatgctgccctgtttcctggagaagaactcaaacacgctcatcacagaccgcaggcccagcccgcgcctgcccaagctccccagcctgcccagcccccggctacaggccctcggctgccccctgaagaccttgtgcagacgcgctgcgagatggaaaagtacctgacaccccaactgccccctgtcccgatcattcccgagcataaaaagtatagacgggattctgccagcgtggttgaccagttctttaccgataccgaggggctgccttactccatcaatatgaacgtgttcctgcccgacattacacacctccgcaccggactgtataaatctcagagaccttgtgtcacacatatcaagaccgaacccgtggcgatttttagccaccagtccgagacgaccgccccgcctcccgctcctacacaagcccttcccgagttcacctctatctttagctcccaccagacagctgcccctgaggttaataacatcttcattaagcaggagctgcccaccccggatctccatctgagcgtgcctacgcaacagggccacctttaccagctgctcaatacacccgacctggatatgccctcttccaccaaccagacagccgctatggacaccctgaatgtcagcatgtctgcggccatggctgggctcaacacccatacatccgccgtgcctcaaacggccgtgaaacagtttcagggaatgccgccctgcacctatacaatgcctagccagttcctgccccaacaggctacctactttcctccctctcctccctccagcgaaccgggctcccctgatcggcaggccgagatgcttcagaatctgacaccccctccctcttatgcggctaccatcgccagcaagctcgccattcacaacccgaatctgcctacgacacttcccgtcaactcccaaaatatccagcctgttcgctacaacagacggagcaatcccgacctggaaaaacgccggattcactactgtgattatcccggctgcaccaaggtgtacaccaaatcttcccatctcaaggctcacctcagaacacataccggggagaagccttataaatgtacatgggaaggatgcgactggcgcttcgccagaagcgacgagctgacgcggcactacagaaagcataccggcgctaaaccgtttcagtgtggggtgtgcaaccgctctttcagccggtccgatcacctcgccctgcacatgaagagacatcagaactga

SEQ ID NO: 9954 - RNA, 1374 nt, synthetic construct
  misc_feature 1..1374: note = derived and/or modified sequence opt6 fromKlf5__Homo_sapiens__AAF18307
  source 1..1374: mol_type = other RNA
atggctaccagagtactatcaatgtcagcaagattaggacccgttccacaaccaccagcaccacaagacgaaccagtattcgcacaattaaaaccagtactaggagcagccaacccagcaagagacgcagccttattcccaggcgaagaactaaaacatgcacatcaccgaccacaagctcaacccgcaccagcccaagccccacaaccagcacaaccaccagcaaccggaccaagactaccaccagaagacctagtacaaacacgctgcgaaatggaaaaatacctaacaccacaactaccaccagttccaataataccagaacataaaaaataccgtagagattccgcatcagtagtagaccaatttttcacagacacagaaggcctaccatactccataaatatgaatgtattcttaccagacataacacacttacgaacaggcctatataaatcacaaagaccctgcgttacacacattaaaacagaacctgtagcaatattctcacaccaatcagaaaccacagccccacctccagcaccaacacaagcactaccagaatttacatctatattctcctctcatcaaaccgcagctccagaagttaacaacatcttcataaaacaagaactaccaactccagacctacacctatcagtcccaacacaacaaggacacctatatcaactacttaacactccagacctcgacatgccatcctcaacaaatcaaactgccgcaatggatactttaaacgtatcaatgtccgctgccatggcaggcctaaacactcacacatcagcagttccacaaacagccgtaaaacaattccaaggaatgccaccctgcacctacactatgccctcacaatttttaccacaacaagcaacatacttcccccccagcccaccatcctctgaaccaggatccccagacagacaagcagaaatgctccaaaaccttactccaccaccctcttatgcagcaacaatagcttcaaaacttgcaatccacaatccaaatctcccaactacacttccagtaaactcccaaaatatccaaccagtaagatataacagaagatcaaatccagacctggaaaaaagaagaatacactactgcgactatccaggctgcacaaaagtctacacaaaatcatcacacctaaaagcacacctaagaacacataccggcgaaaaaccatacaaatgtacatgggaaggctgtgactggagattcgcaagatcagacgaactaactcgacattaccgcaaacacactggagcaaaaccatttcaatgtggagtatgcaacagatccttctcacgttcagatcatttagcactccacatgaaaagacaccaaaactaa

SEQ ID NO: 9955 - protein, 457 aa, synthetic construct; identical to SEQ ID NO: 9947
  REGION 1..457: note = Klf5__Homo_sapiens__Q5T6X2

SEQ ID NO: 9956 - RNA, 1374 nt, synthetic construct
  misc_feature 1..1374: note = Klf5__Homo_sapiens__AAP35287
  source 1..1374: mol_type = other RNA
atggctacaagggtgctgagcatgagcgcccgcctgggacccgtgccccagccgccggcgccgcaggacgagccggtgttcgcgcagctcaagccggtgctgggcgccgcgaatccggcccgcgacgcggcgctcttccccggcgaggagctgaagcacgcgcaccaccgcccgcaggcgcagcccgcgcccgcgcaggccccgcagccggcccagccgcccgccaccggcccgcggctgcctccagaggacctggtccagacaagatgtgaaatggagaagtatctgacacctcagcttcctccagttcctataattccagagcataaaaagtatagacgagacagtgcctcagtcgtagaccagttcttcactgacactgaagggttaccttacagtatcaacatgaacgtcttcctccctgacatcactcacctgagaactggcctctacaaatcccagagaccgtgcgtaacacacatcaagacagaacctgttgccattttcagccaccagagtgaaacgactgcccctcctccggccccgacccaggccctccctgagttcaccagtatattcagctcacaccagaccgcagctccagaggtgaacaatattttcatcaaacaagaacttcctacaccagatcttcatctttctgtccctacccagcagggccacctgtaccagctactgaatacaccggatctagatatgcccagttctacaaatcagacagcagcaatggacactcttaatgtttctatgtcagctgccatggcaggccttaacacacacacctctgctgttccgcagactgcagtgaaacaattccagggcatgcccccttgcacatacacaatgccaagtcagtttcttccacaacaggccacttactttcccccgtcaccaccaagctcagagcctggaagtccagatagacaagcagagatgctccagaatttaaccccacctccatcctatgctgctacaattgcttctaaactggcaattcacaatccaaatttacccaccaccctgccagttaactcacaaaacatccaacctgtcagatacaatagaaggagtaaccccgatttggagaaacgacgcatccactactgcgattaccctggttgcacaaaagtttataccaagtcttctcatttaaaagctcacctgaggactcacactggtgaaaagccatacaagtgtacctgggaaggctgcgactggaggttcgcgcgatcggatgagctgacccgccactaccggaagcacacaggcgccaagcccttccagtgcggggtgtgcaaccgcagcttctcgcgctctgaccacctggccctgcatatgaagaggcaccagaactag

SEQ ID NO: 9957 - RNA, 1374 nt, synthetic construct; identical to SEQ ID NO: 9949
  misc_feature 1..1374: note = derived and/or modified sequence opt1 fromKlf5__Homo_sapiens__AAP35287
  source 1..1374: mol_type = other RNA

SEQ ID NO: 9958 - RNA, 1374 nt, synthetic construct; identical to SEQ ID NO: 9950
  misc_feature 1..1374: note = derived and/or modified sequence opt2 fromKlf5__Homo_sapiens__AAP35287
  source 1..1374: mol_type = other RNA

SEQ ID NO: 9959 - RNA, 1374 nt, synthetic construct; identical to SEQ ID NO: 9951
  misc_feature 1..1374: note = derived and/or modified sequence opt3 fromKlf5__Homo_sapiens__AAP35287
  source 1..1374: mol_type = other RNA

SEQ ID NO: 9960 - RNA, 1374 nt, synthetic construct; identical to SEQ ID NO: 9952
  misc_feature 1..1374: note = derived and/or modified sequence opt4 fromKlf5__Homo_sapiens__AAP35287
  source 1..1374: mol_type = other RNA

SEQ ID NO: 9961 - RNA, 1374 nt, synthetic construct; identical to SEQ ID NO: 9953
  misc_feature 1..1374: note = derived and/or modified sequence opt5 fromKlf5__Homo_sapiens__AAP35287
  source 1..1374: mol_type = other RNA

SEQ ID NO: 9962 - RNA, 1374 nt, synthetic construct
  misc_feature 1..1374: note = derived and/or modified sequence opt6 fromKlf5__Homo_sapiens__AAP35287
  source 1..1374: mol_type = other RNA
atggcaacaagagtcctctccatgtcagcaagactaggacccgtaccccaacccccagccccacaagacgaaccagtattcgcacaactaaaacccgtcctaggtgcagcaaacccagctcgagatgccgccttattcccaggtgaagaattaaaacacgcacatcaccgaccacaagctcaacctgcaccagcacaagcaccacaacccgcacaaccccccgcaacaggcccccgactacctcccgaagacctcgtacaaaccagatgcgaaatggaaaaatacctaaccccccaactacctcccgttcctataatccccgaacacaaaaaatacagaagagactcagcatcagttgttgatcaattctttacagacaccgaaggactaccctattctatcaatatgaacgtctttcttccagatataactcatttaagaacaggtttatacaaatcacaacgaccctgcgttacccacattaaaacagaacccgtagcaatattctcacaccaatcagaaacaaccgcaccacccccagcaccaacacaagcattaccagaattcacatccattttttcctctcatcaaaccgccgccccagaagtaaacaacatattcataaaacaagaattaccaactccagatctacacctatccgtaccaacccaacaaggacacttatatcaactactaaacacaccagaccttgacatgccatcctctactaatcaaacagccgcaatggacacactaaacgtatcaatgtctgccgcaatggcaggactaaatacccacacatccgcagtaccacaaaccgctgtaaaacaatttcaaggaatgccaccctgcacctatacaatgccatcacaattccttccacaacaagcaacctacttcccaccatcacctccatcctcagaaccaggatcaccagaccgacaagcagaaatgctccaaaacctcacccccccaccctcctacgccgcaacaatagcctcaaaactagcaatccacaaccccaaccttcccacaaccttacccgtaaactcccaaaacattcaaccagtacgctacaaccgaagatcaaatcccgacctagaaaaaagaagaatacactactgtgactacccaggttgtactaaagtatatacaaaatcgtcacacctaaaagcacatttacgaacacataccggagaaaaaccttacaaatgcacatgggaaggttgtgattggagattcgctcgatccgatgaactaacaagacactaccgaaaacacacaggcgcaaaaccattccaatgcggcgtatgcaacagatcattctcaagatccgatcaccttgcacttcacatgaaacgacaccaaaactaa

SEQ ID NO: 9963 - protein, 209 aa, synthetic construct
  REGION 1..209: note = LIN28__Homo_sapiens__Q9H9Z2
MGSVSNQQFAGGCAKAAEEAPEEAPEDAARAADEPQLLHGAGICKWFNVRMGFGFLSMTARAGVALDPPVDVFVHQSKLHMEGFRSLKEGEAVEFTFKKSAKGLESIRVTGPGGVFCIGSERRPKGKSMQKRRSKGDRCYNCGGLDHHAKECKLPPQPKKCHFCQSISHMVASCPLKAQQGPSAQGKPTYFREEEEEIHSPTLLPEAQN

SEQ ID NO: 9964 - RNA, 630 nt, synthetic construct
  misc_feature 1..630: note = LIN28__Homo_sapiens__AAH28566
  source 1..630: mol_type = other RNA
atgggctccgtgtccaaccagcagtttgcaggtggctgcgccaaggcggcagaagaggcgcccgaggaggcgccggaggacgcggcccgggcggcggacgagcctcagctgctgcacggtgcgggcatctgtaagtggttcaacgtgcgcatggggttcggcttcctgtccatgaccgcccgcgccggggtcgcgctcgaccccccagtggatgtctttgtgcaccagagtaagctgcacatggaagggttccggagcttgaaggagggtgaggcagtggagttcacctttaagaagtcagccaagggtctggaatccatccgtgtcaccggacctggtggagtattctgtattgggagtgagaggcggccaaaaggaaagagcatgcagaagcgcagatcaaaaggagacaggtgctacaactgtggaggtctagatcatcatgccaaggaatgcaagctgccaccccagcccaagaagtgccacttctgccagagcatcagccatatggtagcctcatgtccgctgaaggcccagcagggccctagtgcacagggaaagccaacctactttcgagaggaagaagaagaaatccacagccctaccctgctcccggaggcacagaattga

SEQ ID NO: 9965 - RNA, 630 nt, synthetic construct
  misc_feature 1..630: note = derived and/or modified sequence opt1 fromLIN28__Homo_sapiens__AAH28566
  source 1..630: mol_type = other RNA
atgggcagcgtgtccaaccagcagttcgccgggggctgcgccaaggcggccgaggaggcccccgaggaggccccggaggacgccgcgcgcgccgccgacgagccccagctgctccacggggccggcatctgcaagtggttcaacgtccggatggggttcggcttcctgagcatgaccgcgcgcgccggcgtggccctggacccgcccgtggacgtcttcgtgcaccagtccaagctccacatggaggggttccggagcctgaaggagggcgaggccgtggagttcaccttcaagaagtccgccaaggggctggagagcatccgcgtcacgggccccgggggcgtgttctgcatcggctccgagcggcgccccaagggcaagagcatgcagaagcggcgctccaagggggaccggtgctacaactgcgggggcctcgaccaccacgcgaaggagtgcaagctgccgccccagcccaagaagtgccacttctgccagagcatctcccacatggtggccagctgccccctgaaggcccagcagggcccctccgcccaggggaagcccacctacttccgcgaggaggaggaggagatccacagcccgaccctcctgcccgaggcccagaactga

SEQ ID NO: 9966 - RNA, 630 nt, synthetic construct
  misc_feature 1..630: note = derived and/or modified sequence opt2 fromLIN28__Homo_sapiens__AAH28566
  source 1..630: mol_type = other RNA
atgggctccgtctccaaccagcagttcgccggcggctgcgccaaggccgccgaggaggcccccgaggaggcccccgaggacgccgcccgcgccgccgacgagccccagctcctccacggcgccggcatctgcaagtggttcaacgtccgcatgggcttcggcttcctctccatgaccgcccgcgccggcgtcgccctcgacccccccgtcgacgtcttcgtccaccagtccaagctccacatggagggcttccgctccctcaaggagggcgaggccgtcgagttcaccttcaagaagtccgccaagggcctcgagtccatccgcgtcaccggccccggcggcgtcttctgcatcggctccgagcgccgccccaagggcaagtccatgcagaagcgccgctccaagggcgaccgctgctacaactgcggcggcctcgaccaccacgccaaggagtgcaagctccccccccagcccaagaagtgccacttctgccagtccatctcccacatggtcgcctcctgccccctcaaggcccagcagggcccctccgcccagggcaagcccacctacttccgcgaggaggaggaggagatccactcccccaccctcctccccgaggcccagaactga

SEQ ID NO: 9967 - RNA, 630 nt, synthetic construct
  misc_feature 1..630: note = derived and/or modified sequence opt3 fromLIN28__Homo_sapiens__AAH28566
  source 1..630: mol_type = other RNA
atgggcagcgtgtccaaccagcaattcgccgggggatgcgctaaggcagccgaggaagcgcccgaggaagctcctgaggacgccgcaagagccgctgatgaaccacagctgctccacggtgcaggcatctgtaaatggtttaatgtcaggatggggttcggatttctttctatgaccgcccgggctggcgttgccctggacccgcccgtggatgtattcgtgcatcagtcaaagttgcacatggagggttttcgcagtttaaaagagggggaagcggtcgagttcacatttaagaaaagcgcaaagggactggaatccattcgagtgactggccctggcggggttttctgcataggatctgagcgtagaccaaagggtaaatcgatgcagaagaggcggtcaaaaggcgaccgctgttacaactgcgggggactagatcatcacgccaaggagtgtaaactgccccctcaaccaaagaagtgccatttttgtcagagcatcagtcacatggtggcttcctgccccctcaaagcccagcagggcccttctgcacaaggtaagccaacgtatttcagagaagaggaagaggaaattcacagcccgacccttctgcccgaggctcagaattga

SEQ ID NO: 9968 - RNA, 630 nt, synthetic construct
  misc_feature 1..630: note = derived and/or modified sequence opt4 fromLIN28__Homo_sapiens__AAH28566
  source 1..630: mol_type = other RNA
atgggcagcgtgagcaaccagcagttcgccggcggctgcgccaaggccgccgaggaggcccccgaggaggcccccgaggacgccgccagagccgccgacgagccccagctgctgcacggcgccggcatctgcaagtggttcaacgtgagaatgggcttcggcttcctgagcatgaccgccagagccggcgtggccctggacccccccgtggacgtgttcgtgcaccagagcaagctgcacatggagggcttcagaagcctgaaggagggcgaggccgtggagttcaccttcaagaagagcgccaagggcctggagagcatcagagtgaccggccccggcggcgtgttctgcatcggcagcgagagaagacccaagggcaagagcatgcagaagagaagaagcaagggcgacagatgctacaactgcggcggcctggaccaccacgccaaggagtgcaagctgcccccccagcccaagaagtgccacttctgccagagcatcagccacatggtggccagctgccccctgaaggcccagcagggccccagcgcccagggcaagcccacctacttcagagaggaggaggaggagatccacagccccaccctgctgcccgaggcccagaactga

SEQ ID NO: 9969 - RNA, 630 nt, synthetic construct
  misc_feature 1..630: note = derived and/or modified sequence opt5 fromLIN28__Homo_sapiens__AAH28566
  source 1..630: mol_type = other RNA
atgggcagcgtgtccaaccagcaattcgccgggggatgcgctaaggccgcggaggaagctcccgaggaagcccctgaggacgccgctagagccgctgatgaaccgcagctgctccacggcgccgggatctgtaaatggtttaatgtccggatgggattcggctttctgtctatgaccgcgcgcgccggggttgctcttgatccccctgtggacgtgttcgtccatcagagcaagctgcacatggagggatttagatccctcaaagagggcgaagccgtggagttcacatttaagaaatctgctaagggcctggaaagcattcgggttacggggcccggaggcgtgttctgcatcgggtccgagcgcagacctaagggaaaatctatgcagaagcggcgcagcaaaggcgacagatgttacaactgcgggggacttgatcatcacgccaaggagtgtaaactgccccctcaaccgaagaagtgccatttttgtcagtccattagccacatggtcgcgtcttgccccctcaaagcccagcagggcccttccgctcaaggcaagcccacctatttccgggaagaggaagaggaaatccacagccctacactgctgcccgaggcccagaattga

SEQ ID NO: 9970 - RNA, 630 nt, synthetic construct
  misc_feature 1..630: note = derived and/or modified sequence opt6 fromLIN28__Homo_sapiens__AAH28566
  source 1..630: mol_type = other RNA
atgggatcagtatcaaatcaacaatttgcaggaggatgtgcaaaagcagcagaagaagcaccagaagaagcaccagaagatgcagcaagagcagcagatgaaccacaattactacatggagcaggaatatgcaaatggtttaacgtaagaatgggatttggatttctatcaatgacagcaagagcaggagtcgcactagatccaccagtagacgtatttgtacatcaaagtaaattacatatggaaggattcaggagtttaaaagaaggagaagcagtagaatttacatttaaaaaaagcgcaaaaggactagaaagcataagagttacaggaccaggaggagtattctgtataggaagcgaaagaagaccaaaaggaaaaagcatgcaaaaaagaagaagcaaaggagatagatgttacaattgcggaggattagaccatcacgcaaaagaatgcaaattaccaccacaaccaaaaaaatgtcacttttgccaaagtataagccacatggtagcatcatgcccattaaaagcacaacaaggaccatcagcacaaggaaaaccaacatactttagagaagaagaagaagaaatacatagcccaacattactaccagaagcacaaaattaa

SEQ ID NO: 9971 - protein, 139 aa, synthetic construct
  REGION 1..139: note = L-myc__Homo_sapiens__A0A0A0N0L0
MDYDSYQHYFYDYDCGEDFYRSTAPSEDIWKKFELVPSPPTSPPWGLGPGAGDPAPGIGPPEPWPGGCTGDEAESRGHSKGWGRNYASIIRRDCMWSGFSASKPATRRPPPPVRWANPRPRPAPGPRAQATRRMKKLML

SEQ ID NO: 9972 - RNA, 420 nt, synthetic construct
  misc_feature 1..420: note = L-myc__Homo_sapiens__AER93388
  source 1..420: mol_type = other RNA
atggactacgactcgtaccagcactatttctacgactatgactgcggggaggatttctaccgctccacggcgcccagcgaggacatctggaagaaattcgagctggtgccatcgccccccacgtcgccgccctggggcttgggtcccggcgcaggggacccggcccccgggattggtcccccggagccgtggcccggagggtgcaccggagacgaagcggaatcccggggccactcgaaaggctggggcaggaactacgcctccatcatacgccgtgactgcatgtggagcggcttctcagcctcgaagccggcaacccggcgcccgccgccccctgtccgctgggcgaacccaagacccaggcctgctccgggtccgagagcccaagcgactcggagaatgaagaaattgatgttgtga

SEQ ID NO: 9973 - RNA, 420 nt, synthetic construct
  misc_feature 1..420: note = derived and/or modified sequence opt1 fromL-myc__Homo_sapiens__AER93388
  source 1..420: mol_type = other RNA
atggactacgacagctaccagcactacttctacgactacgactgcggcgaggacttctaccgctccaccgcccccagcgaggacatctggaagaagttcgagctggtgccctccccgcccaccagcccgccctgggggctcggccccggggccggcgaccccgcgcccgggatcggcccgcccgagccctggcccggcgggtgcacgggcgacgaggccgagtcccgggggcacagcaagggctgggggcgcaactacgcctccatcatccggcgcgactgcatgtggagcggcttctccgccagcaagccggccacccggcgcccgcccccgcccgtccggtgggcgaacccccgcccccggcccgcccccggcccccgcgcccaggccacccggcgcatgaagaagctgatgctgtga

SEQ ID NO: 9974 - RNA, 420 nt, synthetic construct
  misc_feature 1..420: note = derived and/or modified sequence opt2 fromL-myc__Homo_sapiens__AER93388
  source 1..420: mol_type = other RNA
atggactacgactcctaccagcactacttctacgactacgactgcggcgaggacttctaccgctccaccgccccctccgaggacatctggaagaagttcgagctcgtcccctccccccccacctcccccccctggggcctcggccccggcgccggcgaccccgcccccggcatcggcccccccgagccctggcccggcggctgcaccggcgacgaggccgagtcccgcggccactccaagggctggggccgcaactacgcctccatcatccgccgcgactgcatgtggtccggcttctccgcctccaagcccgccacccgccgcccccccccccccgtccgctgggccaacccccgcccccgccccgcccccggcccccgcgcccaggccacccgccgcatgaagaagctcatgctctga

SEQ ID NO: 9975 - RNA, 420 nt, synthetic construct
  misc_feature 1..420: note = derived and/or modified sequence opt3 fromL-myc__Homo_sapiens__AER93388
  source 1..420: mol_type = other RNA
atggactacgatagctatcagcactacttctatgactacgattgcggcgaggacttttatagatccaccgccccctctgaagatatctggaagaaattcgagctggtgccttcaccaccgacaagtcccccttgggggctcggaccaggtgctggcgaccccgcacctgggattggaccacccgaaccttggccaggcggttgtactggggatgaggccgaaagcaggggacattccaagggctggggccggaactacgcgtctataatccgccgagactgcatgtggtcggggttttcagctagcaaaccggccacgcgtagaccccctccacccgtcaggtgggcaaatcctcggccacgccccgccccgggacctagagctcaagcaaccaggcggatgaagaaacttatgctgtga

SEQ ID NO: 9976 - RNA, 420 nt, synthetic construct
  misc_feature 1..420: note = derived and/or modified sequence opt4 fromL-myc__Homo_sapiens__AER93388
  source 1..420: mol_type = other RNA
atggactacgacagctaccagcactacttctacgactacgactgcggcgaggacttctacagaagcaccgcccccagcgaggacatctggaagaagttcgagctggtgcccagcccccccaccagccccccctggggcctgggccccggcgccggcgaccccgcccccggcatcggcccccccgagccctggcccggcggctgcaccggcgacgaggccgagagcagaggccacagcaagggctggggcagaaactacgccagcatcatcagaagagactgcatgtggagcggcttcagcgccagcaagcccgccaccagaagaccccccccccccgtgagatgggccaaccccagacccagacccgcccccggccccagagcccaggccaccagaagaatgaagaagctgatgctgtga

SEQ ID NO: 9977 - RNA, 420 nt, synthetic construct
  misc_feature 1..420: note = derived and/or modified sequence opt5 fromL-myc__Homo_sapiens__AER93388
  source 1..420: mol_type = other RNA
atggactacgatagctatcagcactacttctatgactacgattgcggcgaggacttttatagatccaccgccccctctgaagatatctggaagaaattcgagctggtgcctagcccgcccacatcccctccctgggggctcggacctggcgctggggaccccgcccctggaattggcccgcccgaaccttggcccgggggatgtacgggcgatgaggcggaatctcggggccatagcaaggggtggggacgcaactacgcttccatcattagacgggactgcatgtggtctggctttagcgcctccaaacctgccacccgcagacccccgcctcccgtccggtgggctaatcctcgccccagacccgcccctgggccgcgggctcaagccacacgcagaatgaagaaactgatgctttga

SEQ ID NO: 9978 - RNA, 420 nt, synthetic construct
  misc_feature 1..420: note = derived and/or modified sequence opt6 fromL-myc__Homo_sapiens__AER93388
  source 1..420: mol_type = other RNA
atggattatgattcatatcaacattatttttatgattatgattgtggagaagatttttatagaagtacagcaccaagtgaagatatatggaaaaaatttgaattagtaccaagtccaccaacaagcccaccatggggactaggaccaggagcaggagatccagcaccaggaataggaccaccagaaccatggccaggaggatgtacaggagatgaagcagaatcaagaggacattcaaaaggatggggaagaaattatgcaagtataataagaagagattgtatgtggtcaggatttagtgcaagtaaaccagcaacaagaagaccaccaccaccagtaagatgggcaaatccaagaccaagaccagcaccaggaccaagagcacaagcaacaagaagaatgaaaaaattaatgttataa

SEQ ID NO: 9979 - protein, 305 aa, synthetic construct
  REGION 1..305: note = Nanog__Homo_sapiens__Q9H9S0
MSVDPACPQSLPCFEASDCKESSPMPVICGPEENYPSLQMSSAEMPHTETVSPLPSSMDLLIQDSPDSSTSPKGKQPTSAEKSVAKKEDKVPVKKQKTRTVFSSTQLCVLNDRFQRQKYLSLQQMQELSNILNLSYKQVKTWFQNQRMKSKRWQKNNWPKNSNGVTQKASAPTYPSLYSSYHQGCLVNPTGNLPMWSNQTWNNSTWSNQTQNIQSWSNHSWNTQTWCTQSWNNQAWNSPFYNCGEESLQSCMQFQPNSPASDLEAALEAAGEGLNVIQQTTRYFSTPQTMDLFLNYSMNMQPEDV

SEQ ID NO: 9980 - RNA, 918 nt, synthetic construct
  misc_feature 1..918: note = Nanog__Homo_sapiens__AAP49529
  source 1..918: mol_type = other RNA
atgagtgtggatccagcttgtccccaaagcttgccttgctttgaagcatccgactgtaaagaatcttcacctatgcctgtgatttgtgggcctgaagaaaactatccatccttgcaaatgtcttctgctgagatgcctcacacggagactgtctctcctcttccttcctccatggatctgcttattcaggacagccctgattcttccaccagtcccaaaggcaaacaacccacttctgcagagaagagtgtcgcaaaaaaggaagacaaggtcccggtcaagaaacagaagaccagaactgtgttctcttccacccagctgtgtgtactcaatgatagatttcagagacagaaatacctcagcctccagcagatgcaagaactctccaacatcctgaacctcagctacaaacaggtgaagacctggttccagaaccagagaatgaaatctaagaggtggcagaaaaacaactggccgaagaatagcaatggtgtgacgcagaaggcctcagcacctacctaccccagcctttactcttcctaccaccagggatgcctggtgaacccgactgggaaccttccaatgtggagcaaccagacctggaacaattcaacctggagcaaccagacccagaacatccagtcctggagcaaccactcctggaacactcagacctggtgcacccaatcctggaacaatcaggcctggaacagtcccttctataactgtggagaggaatctctgcagtcctgcatgcagttccagccaaattctcctgccagtgacttggaggctgccttggaagctgctggggaaggccttaatgtaatacagcagaccactaggtattttagtactccacaaaccatggatttattcctaaactactccatgaacatgcaacctgaagacgtgtga

SEQ ID NO: 9981 - RNA, 918 nt, synthetic construct
  misc_feature 1..918: note = derived and/or modified sequence opt1 fromNanog__Homo_sapiens__AAP49529
  source 1..918: mol_type = other RNA
atgagcgtggaccccgcctgcccgcagtccctgccctgcttcgaggccagcgactgcaaggagtccagccccatgcccgtcatctgcggcccggaggagaactacccctccctccagatgagctccgcggagatgccccacaccgagaccgtgagccccctgccgtccagcatggacctgctcatccaggactcccccgacagctccaccagccccaaggggaagcagcccacctccgccgagaagtccgtggccaagaaggaggacaaggtcccggtgaagaagcagaagacccgcaccgtgttcagcagcacgcagctgtgcgtcctgaacgaccggttccagcgccagaagtacctctccctgcagcagatgcaggagctgagcaacatcctcaacctgagctacaagcaggtcaagacctggttccagaaccagcggatgaagtccaagcgctggcagaagaacaactggcccaagaacagcaacggcgtgacccagaaggcctccgcccccacctaccccagcctgtactccagctaccaccaggggtgcctcgtgaacccgacgggcaacctgcccatgtggtccaaccagacctggaacaacagcacctggtccaaccagacccagaacatccagagctggtccaaccacagctggaacacgcagacctggtgcacccagtcctggaacaaccaggcgtggaacagccccttctacaactgcggggaggagtccctgcagagctgcatgcagttccagcccaactccccggccagcgacctcgaggccgccctggaggcggccggcgagggcctgaacgtgatccagcagaccacgcggtacttctccacgccccagaccatggacctcttcctgaactacagcatgaacatgcagcccgaggacgtgtga

SEQ ID NO: 9982 - RNA, 918 nt, synthetic construct
  misc_feature 1..918: note = derived and/or modified sequence opt2 fromNanog__Homo_sapiens__AAP49529
  source 1..918: mol_type = other RNA
atgtccgtcgaccccgcctgcccccagtccctcccctgcttcgaggcctccgactgcaaggagtcctcccccatgcccgtcatctgcggccccgaggagaactacccctccctccagatgtcctccgccgagatgccccacaccgagaccgtctcccccctcccctcctccatggacctcctcatccaggactcccccgactcctccacctcccccaagggcaagcagcccacctccgccgagaagtccgtcgccaagaaggaggacaaggtccccgtcaagaagcagaagacccgcaccgtcttctcctccacccagctctgcgtcctcaacgaccgcttccagcgccagaagtacctctccctccagcagatgcaggagctctccaacatcctcaacctctcctacaagcaggtcaagacctggttccagaaccagcgcatgaagtccaagcgctggcagaagaacaactggcccaagaactccaacggcgtcacccagaaggcctccgcccccacctacccctccctctactcctcctaccaccagggctgcctcgtcaaccccaccggcaacctccccatgtggtccaaccagacctggaacaactccacctggtccaaccagacccagaacatccagtcctggtccaaccactcctggaacacccagacctggtgcacccagtcctggaacaaccaggcctggaactcccccttctacaactgcggcgaggagtccctccagtcctgcatgcagttccagcccaactcccccgcctccgacctcgaggccgccctcgaggccgccggcgagggcctcaacgtcatccagcagaccacccgctacttctccaccccccagaccatggacctcttcctcaactactccatgaacatgcagcccgaggacgtctga

SEQ ID NO: 9983 - RNA, 918 nt, synthetic construct
  misc_feature 1..918: note = derived and/or modified sequence opt3 fromNanog__Homo_sapiens__AAP49529
  source 1..918: mol_type = other RNA
atgagcgtggaccccgcctgccctcagtccctgccatgtttcgaggcttctgattgcaaggaatcaagtccgatgcccgtcatctgtggccctgaggaaaactacccaagcctccaaatgtcctctgcagagatgccccacaccgaaacagtttcgcctcttccatcaagcatggacctgttgattcaggatagtcccgactcctctactagccctaaagggaagcagccaacgtccgccgagaaatcagtggcgaagaaagaggataaggtaccggtgaagaaacagaagaccagaacagtctttagtagcactcaattatgcgtgctgaatgacaggttccagcggcagaaatatctatctctccagcaaatgcaggaactgtccaacatacttaatctgtcatacaagcaggttaaaacctggtttcagaaccaacgcatgaaaagcaagcgatggcagaaaaataactggcccaagaatagtaacggagtgacacagaaggcttctgcccctacctatccatccttgtacagctcgtatcatcaaggttgtctcgtcaatcccactggcaacctgcctatgtggtctaatcagacatggaacaattccacctggtcaaaccagacgcagaatatccaaagttggagcaaccactcctggaacactcagacctggtgcacacagtcttggaataaccaggcatggaatagcccattctacaactgtggggaggaatcactgcaaagttgcatgcagtttcagcccaattccccggccagcgatctcgaggctgcattagaggccgctggagaaggcctgaacgtgattcagcaaactacccgttatttctctacacctcagaccatggacttgtttcttaattactcaatgaacatgcagcccgaggatgtatga

SEQ ID NO: 9984 - RNA, 918 nt, synthetic construct
  misc_feature 1..918: note = derived and/or modified sequence opt4 fromNanog__Homo_sapiens__AAP49529
  source 1..918: mol_type = other RNA
atgagcgtggaccccgcctgcccccagagcctgccctgcttcgaggccagcgactgcaaggagagcagccccatgcccgtgatctgcggccccgaggagaactaccccagcctgcagatgagcagcgccgagatgccccacaccgagaccgtgagccccctgcccagcagcatggacctgctgatccaggacagccccgacagcagcaccagccccaagggcaagcagcccaccagcgccgagaagagcgtggccaagaaggaggacaaggtgcccgtgaagaagcagaagaccagaaccgtgttcagcagcacccagctgtgcgtgctgaacgacagattccagagacagaagtacctgagcctgcagcagatgcaggagctgagcaacatcctgaacctgagctacaagcaggtgaagacctggttccagaaccagagaatgaagagcaagagatggcagaagaacaactggcccaagaacagcaacggcgtgacccagaaggccagcgcccccacctaccccagcctgtacagcagctaccaccagggctgcctggtgaaccccaccggcaacctgcccatgtggagcaaccagacctggaacaacagcacctggagcaaccagacccagaacatccagagctggagcaaccacagctggaacacccagacctggtgcacccagagctggaacaaccaggcctggaacagccccttctacaactgcggcgaggagagcctgcagagctgcatgcagttccagcccaacagccccgccagcgacctggaggccgccctggaggccgccggcgagggcctgaacgtgatccagcagaccaccagatacttcagcaccccccagaccatggacctgttcctgaactacagcatgaacatgcagcccgaggacgtgtga

SEQ ID NO: 9985 - RNA, 918 nt, synthetic construct
  misc_feature 1..918: note = derived and/or modified sequence opt5 fromNanog__Homo_sapiens__AAP49529
  source 1..918: mol_type = other RNA
atgagcgtggaccccgcctgccctcagtccctgccgtgtttcgaggcttctgattgcaaggaaagctcccccatgcctgtcatctgtggccccgaggaaaactacccttctctccaaatgagctccgccgagatgccccacaccgaaacagtttctcctctgccgagctccatggaccttctgattcaggatagccccgactcttccacgagccctaaagggaagcagcccacctctgcggagaaatccgtggctaagaaagaggataaggtgcctgtcaagaaacagaagacaagaaccgtgtttagctctacacaactctgcgttctgaatgaccggttccagcgccagaaatatctttccctgcagcaaatgcaggaactcagcaacatcctgaatctgtcctacaaacaggtgaagacctggtttcagaaccaaagaatgaagtctaagcggtggcagaaaaataactggcccaagaatagcaacggagtcacacagaaagcctccgccccgacctatcctagcctctactcttcctatcatcaaggctgtctggtgaatcccacggggaaccttcctatgtggagcaatcagacctggaacaattctacatggagcaaccagacccagaatattcaatcctggtctaaccacagctggaacacacagacctggtgcacgcagtcctggaataaccaggcttggaatagccccttctacaactgtggagaggaatctctgcaatcctgcatgcagtttcagcccaatagccctgcctctgatctcgaggctgccctggaggcggccggcgaagggcttaacgttatccagcaaacaacccgctatttctccacaccgcagaccatggacctgtttctcaattacagcatgaacatgcagcccgaggatgtgtga

SEQ ID NO: 9986 - RNA, 918 nt, synthetic construct
  misc_feature 1..918: note = derived and/or modified sequence opt6 fromNanog__Homo_sapiens__AAP49529
  source 1..918: mol_type = other RNA
atgtcagtcgatccagcatgcccacaatccctcccatgcttcgaagcatcagattgcaaagaatcatctcctatgcccgtaatatgcggacccgaagaaaattacccatcactacaaatgtcatcagcagaaatgccacacacagaaacagtatcacctctcccatcatcaatggacctattaatacaagactcaccagactcatcaacatcaccaaaaggaaaacaacctacatctgcagaaaaatcagtagcaaaaaaagaagacaaagtaccagtaaaaaaacaaaaaacaagaacagtattctcctcaacccaactatgcgtactcaatgacagattccaaagacaaaaatacctatcactacaacaaatgcaagaactatcaaacatactcaacctatcttacaaacaagtaaaaacatggttccaaaaccaacgaatgaaatcaaaaagatggcaaaaaaacaactggccaaaaaactctaacggagtaactcaaaaagcatcagcaccaacctacccatccctatactcatcttaccaccaaggatgcctagtaaacccaacaggaaacctaccaatgtggtcaaaccaaacatggaacaattcaacatggtcaaaccaaacacaaaacatacaatcctggtccaaccattcatggaacacacaaacatggtgcacacaatcctggaacaatcaagcatggaactcaccattctacaactgcggagaagaatccttacaatcctgcatgcaattccaaccaaactcccctgcatccgacttagaagcagcattagaagcagcaggcgaaggattaaacgtaatacaacaaactacaagatacttctcaacaccacaaacaatggacctattcctaaattactcaatgaacatgcaaccagaagacgtctaa

SEQ ID NO: 9987 - protein, 464 aa, synthetic construct
  REGION 1..464: note = N-myc__Homo_sapiens__P04198
MPSCSTSTMPGMICKNPDLEFDSLQPCFYPDEDDFYFGGPDSTPPGEDIWKKFELLPTPPLSPSRGFAEHSSEPPSWVTEMLLENELWGSPAEEDAFGLGGLGGLTPNPVILQDCMWSGFSAREKLERAVSEKLQHGRGPPTAGSTAQSPGAGAASPAGRGHGGAAGAGRAGAALPAELAHPAAECVDPAVVFPFPVNKREPAPVPAAPASAPAAGPAVASGAGIAAPAGAPGVAPPRPGGRQTSGGDHKALSTSGEDTLSDSDDEDDEEEDEEEEIDVVTVEKRRSSSNTKAVTTFTITVRPKNAALGPGRAQSSELILKRCLPIHQQHNYAAPSPYVESEDAPPQKKIKSEASPRPLKSVIPPKAKSLSPRNSDSEDSERRRNHNILERQRRNDLRSSFLTLRDHVPELVKNEKAAKVVILKKATEYVHSLQAEEHQLLLEKEKLQARQQQLLKKIEHARTC

SEQ ID NO: 9988 - RNA, 1395 nt, synthetic construct
  misc_feature 1..1395: note = N-myc__Homo_sapiens__AAH02712
  source 1..1395: mol_type = other RNA
atgccgagctgctccacgtccaccatgccgggcatgatctgcaagaacccagacctcgagtttgactcgctacagccctgcttctacccggacgaagatgacttctacttcggcggccccgactcgacccccccgggggaggacatctggaagaagtttgagctgctgcccacgcccccgctgtcgcccagccgtggcttcgcggagcacagctccgagcccccgagctgggtcacggagatgctgcttgagaacgagctgtggggcagcccggccgaggaggacgcgttcggcctggggggactgggtggcctcacccccaacccggtcatcctccaggactgcatgtggagcggcttctccgcccgcgagaagctggagcgcgccgtgagcgagaagctgcagcacggccgcgggccgccaaccgccggttccaccgcccagtccccgggagccggcgccgccagccctgcgggtcgcgggcacggcggggctgcgggagccggccgcgccggggccgccctgcccgccgagctcgcccacccggccgccgagtgcgtggatcccgccgtggtcttcccctttcccgtgaacaagcgcgagccagcgcccgtgcccgcagccccggccagtgccccggcggcgggccctgcggtcgcctcgggggcgggtattgccgccccagccggggccccgggggtcgcccctccgcgcccaggcggccgccagaccagcggcggcgaccacaaggccctcagtacctccggagaggacaccctgagcgattcagatgatgaagatgatgaagaggaagatgaagaggaagaaatcgacgtggtcactgtggagaagcggcgttcctcctccaacaccaaggctgtcaccacattcaccatcactgtgcgtcccaagaacgcagccctgggtcccgggagggctcagtccagcgagctgatcctcaaacgatgccttcccatccaccagcagcacaactatgccgccccctctccctacgtggagagtgaggatgcacccccacagaagaagataaagagcgaggcgtccccacgtccgctcaagagtgtcatccccccaaaggctaagagcttgagcccccgaaactctgactcggaggacagtgagcgtcgcagaaaccacaacatcctggagcgccagcgccgcaacgaccttcggtccagctttctcacgctcagggaccacgtgccggagttggtaaagaatgagaaggccgccaaggtggtcattttgaaaaaggccactgagtatgtccactccctccaggccgaggagcaccagcttttgctggaaaaggaaaaattgcaggcaagacagcagcagttgctaaagaaaattgaacacgctcggacttgctag

SEQ ID NO: 9989 - RNA, 1395 nt, synthetic construct
  misc_feature 1..1395: note = derived and/or modified sequence opt1 fromN-myc__Homo_sapiens__AAH02712
  source 1..1395: mol_type = other RNA
atgcccagctgctccaccagcaccatgccgggcatgatctgcaagaaccccgacctggagttcgactccctccagccctgcttctaccccgacgaggacgacttctacttcgggggcccggacagcacgccgcccggggaggacatctggaagaagttcgagctgctgcccaccccgcccctctcccccagccgcggcttcgccgagcactccagcgagcccccgtcctgggtgaccgagatgctgctggagaacgagctctgggggagccccgccgaggaggacgcgttcggcctgggcgggctgggcgggctcacccccaaccccgtcatcctgcaggactgcatgtggtccggcttcagcgcccgcgagaagctggagcgcgccgtgtccgagaagctccagcacgggcggggcccgcccacggccggcagcaccgcccagtcccccggggcgggcgccgccagccccgccgggcgcggccacggcggggcggccggcgccgggcgggccggcgccgcgctgccggccgagctggcccaccccgccgccgagtgcgtggaccccgcggtcgtgttccccttcccggtgaacaagcgcgagcccgcccccgtccccgccgccccggcctccgcgcccgccgccgggcccgccgtggccagcggcgcgggcatcgccgccccggccggggcgcccggcgtggccccgccccggcccgggggccgccagacctccgggggcgaccacaaggccctcagcaccagcggcgaggacacgctgtccgacagcgacgacgaggacgacgaggaggaggacgaggaggaggagatcgacgtcgtgaccgtggagaagcggcgctccagctccaacaccaaggccgtcaccacgttcaccatcaccgtgcggcccaagaacgccgcgctggggcccggccgcgcccagagctccgagctcatcctgaagcggtgcctgcccatccaccagcagcacaactacgccgcccccagcccctacgtggagtccgaggacgccccgccccagaagaagatcaagagcgaggcgagcccccgccccctcaagtccgtcatcccgcccaaggccaagtccctgagcccccggaactccgacagcgaggactccgagcgccggcgcaaccacaacatcctggagcggcagcgccggaacgacctccgcagctccttcctgaccctgcgcgaccacgtgcccgagctcgtgaagaacgagaaggccgccaaggtcgtgatcctgaagaaggccacggagtacgtgcacagcctgcaggcggaggagcaccagctcctgctggagaaggagaagctccaggcccggcagcagcagctgctgaagaagatcgagcacgcccggacctgctga

SEQ ID NO: 9990 - RNA, 1395 nt, synthetic construct
  misc_feature 1..1395: note = derived and/or modified sequence opt2 fromN-myc__Homo_sapiens__AAH02712
  source 1..1395: mol_type = other RNA
atgccctcctgctccacctccaccatgcccggcatgatctgcaagaaccccgacctcgagttcgactccctccagccctgcttctaccccgacgaggacgacttctacttcggcggccccgactccaccccccccggcgaggacatctggaagaagttcgagctcctccccaccccccccctctccccctcccgcggcttcgccgagcactcctccgagcccccctcctgggtcaccgagatgctcctcgagaacgagctctggggctcccccgccgaggaggacgccttcggcctcggcggcctcggcggcctcacccccaaccccgtcatcctccaggactgcatgtggtccggcttctccgcccgcgagaagctcgagcgcgccgtctccgagaagctccagcacggccgcggcccccccaccgccggctccaccgcccagtcccccggcgccggcgccgcctcccccgccggccgcggccacggcggcgccgccggcgccggccgcgccggcgccgccctccccgccgagctcgcccaccccgccgccgagtgcgtcgaccccgccgtcgtcttccccttccccgtcaacaagcgcgagcccgcccccgtccccgccgcccccgcctccgcccccgccgccggccccgccgtcgcctccggcgccggcatcgccgcccccgccggcgcccccggcgtcgcccccccccgccccggcggccgccagacctccggcggcgaccacaaggccctctccacctccggcgaggacaccctctccgactccgacgacgaggacgacgaggaggaggacgaggaggaggagatcgacgtcgtcaccgtcgagaagcgccgctcctcctccaacaccaaggccgtcaccaccttcaccatcaccgtccgccccaagaacgccgccctcggccccggccgcgcccagtcctccgagctcatcctcaagcgctgcctccccatccaccagcagcacaactacgccgccccctccccctacgtcgagtccgaggacgcccccccccagaagaagatcaagtccgaggcctccccccgccccctcaagtccgtcatcccccccaaggccaagtccctctccccccgcaactccgactccgaggactccgagcgccgccgcaaccacaacatcctcgagcgccagcgccgcaacgacctccgctcctccttcctcaccctccgcgaccacgtccccgagctcgtcaagaacgagaaggccgccaaggtcgtcatcctcaagaaggccaccgagtacgtccactccctccaggccgaggagcaccagctcctcctcgagaaggagaagctccaggcccgccagcagcagctcctcaagaagatcgagcacgcccgcacctgctga

SEQ ID NO: 9991 - RNA, 1395 nt, synthetic construct
  misc_feature 1..1395: note = derived and/or modified sequence opt3 fromN-myc__Homo_sapiens__AAH02712
  source 1..1395: mol_type = other RNA
atgcccagctgctccacctctacaatgcctggcatgatctgtaagaacccagacctggagttcgattcactccagccgtgcttttaccccgacgaagatgacttctattttgggggacctgatagtactccacccggtgaggacatttggaaaaagttcgaacttctgcctacgccacccttgagcccttccagaggctttgccgagcactcttcggaaccaccgtcatgggtgaccgagatgttactggagaatgaactatgggggagccccgctgaggaagatgcattcggactcggcggtctagggggacttacacctaacccagtcatactgcaagactgtatgtggagtggcttttccgccagggagaaattggagcgggcggtttctgaaaagctccagcatggccgcgggccccctactgctggaagcaccgcccagtccccaggtgcaggcgccgcttcacccgcagggcgaggacacggcggtgccgctggggccggacgtgcgggcgcagccctgccggctgagctggcccatcctgcagctgaatgcgtggatcccgccgtagtgttcccatttcctgtcaataaaagagagcccgcgccagtgcccgccgcccctgctagtgccccagctgccggcccggcagttgccagcggggctggaatcgcggcacccgccggtgctcctggcgtggccccacccaggcctgggggacggcagacatctggcggtgaccacaaggcactctccacctcaggggaagatactttaagcgacagtgatgacgaggacgatgaggaagaggacgaagaggaagagattgatgtcgtgacagtagagaagcgcagatcttccagcaacaccaaagccgttacgactttcaccatcacagtgaggccaaagaatgctgccctgggccccggacgggcacaatcgtctgaacttattttgaaacgctgtctgccgatccatcagcagcacaactacgcggctccttccccatatgtcgagtcagaagacgcaccccctcagaagaaaataaagagtgaggcaagcccccgaccactaaagtccgtgatccctcccaaagccaagtctctcagcccaagaaattcagatagtgaagactccgagaggcggcgtaaccacaatattctggagcgccaaagaaggaacgatcttcggagctcttttctgactttgcgagaccatgtgccggaactcgtcaaaaatgagaaggctgccaaagttgtgatcctgaagaaagcaaccgaatacgtacactcattacaggctgaggagcatcagctgctccttgaaaaggagaagctgcaggcccgccaacagcagttgctgaaaaagattgaacacgcgagaacatgctga

SEQ ID NO: 9992 - RNA, 1395 nt, synthetic construct
  misc_feature 1..1395: note = derived and/or modified sequence opt4 fromN-myc__Homo_sapiens__AAH02712
  source 1..1395: mol_type = other RNA
atgcccagctgcagcaccagcaccatgcccggcatgatctgcaagaaccccgacctggagttcgacagcctgcagccctgcttctaccccgacgaggacgacttctacttcggcggccccgacagcaccccccccggcgaggacatctggaagaagttcgagctgctgcccaccccccccctgagccccagcagaggcttcgccgagcacagcagcgagccccccagctgggtgaccgagatgctgctggagaacgagctgtggggcagccccgccgaggaggacgccttcggcctgggcggcctgggcggcctgacccccaaccccgtgatcctgcaggactgcatgtggagcggcttcagcgccagagagaagctggagagagccgtgagcgagaagctgcagcacggcagaggcccccccaccgccggcagcaccgcccagagccccggcgccggcgccgccagccccgccggcagaggccacggcggcgccgccggcgccggcagagccggcgccgccctgcccgccgagctggcccaccccgccgccgagtgcgtggaccccgccgtggtgttccccttccccgtgaacaagagagagcccgcccccgtgcccgccgcccccgccagcgcccccgccgccggccccgccgtggccagcggcgccggcatcgccgcccccgccggcgcccccggcgtggccccccccagacccggcggcagacagaccagcggcggcgaccacaaggccctgagcaccagcggcgaggacaccctgagcgacagcgacgacgaggacgacgaggaggaggacgaggaggaggagatcgacgtggtgaccgtggagaagagaagaagcagcagcaacaccaaggccgtgaccaccttcaccatcaccgtgagacccaagaacgccgccctgggccccggcagagcccagagcagcgagctgatcctgaagagatgcctgcccatccaccagcagcacaactacgccgcccccagcccctacgtggagagcgaggacgcccccccccagaagaagatcaagagcgaggccagccccagacccctgaagagcgtgatcccccccaaggccaagagcctgagccccagaaacagcgacagcgaggacagcgagagaagaagaaaccacaacatcctggagagacagagaagaaacgacctgagaagcagcttcctgaccctgagagaccacgtgcccgagctggtgaagaacgagaaggccgccaaggtggtgatcctgaagaaggccaccgagtacgtgcacagcctgcaggccgaggagcaccagctgctgctggagaaggagaagctgcaggccagacagcagcagctgctgaagaagatcgagcacgccagaacctgctga

SEQ ID NO: 9993 - RNA, 1395 nt, synthetic construct
  misc_feature 1..1395: note = derived and/or modified sequence opt5 fromN-myc__Homo_sapiens__AAH02712
  source 1..1395: mol_type = other RNA
atgcccagctgctccacctctacaatgcctggcatgatctgtaagaacccggacctggagttcgatagcctccagccctgcttttaccctgacgaagatgacttctattttgggggacccgattccacgcctcccggcgaggacatttggaaaaagttcgaactgcttcctaccccgcccctgtctcctagcagagggtttgccgagcactcctctgaaccccctagctgggtgacagagatgctcctggagaatgaactttggggatcccccgctgaggaagatgccttcggcctcgggggactgggcggcctgaccccgaaccctgtcatcctgcaagactgtatgtggagcgggttttctgcgcgggagaaactcgagcgcgctgtttccgaaaagctgcagcatggaagaggaccccctacagccgggagcaccgcccagtctcccggagctggcgccgcttcccccgccgggcggggacacggcggcgcggccggggctggacgcgccggcgctgcccttcctgcggagctggcccatccggctgccgaatgcgtggatcccgctgtggtcttcccttttcccgtgaataaaagagagcctgcccccgttccggccgctcctgcgagcgcccccgctgccgggcctgccgtggcttctggagccggcattgcggctcccgccggggcccctggagtcgctcccccgcggcctggcggccgccagacatccgggggagaccacaaggccctcagcacctccggcgaagatacgctgtctgacagcgatgacgaggacgatgaggaagaggacgaagaggaagagatcgatgtggttaccgtggagaagagacggtccagctctaacacaaaagctgtcaccacattcaccattacggtgcgccccaagaatgccgcgcttgggcccggcagagcccaatccagcgaactgatcctcaaacggtgtctgcctatccatcagcagcacaactacgctgccccgtctccctatgtggagagcgaagacgctcctccccagaagaaaattaagtccgaggcctctcctcgccccctcaagagcgtcatccctcccaaagcgaagtccctgagcccgagaaattctgattccgaagacagcgagcggcgcagaaaccacaatattctggagcggcaaagacgcaacgatcttcggtcttcctttctgacactcagagaccatgttcctgaactggtgaaaaatgagaaggccgctaaagtggtcatccttaagaaagccaccgaatacgtgcacagcctgcaggctgaggagcatcagctcctgctggaaaaggagaagctccaggcccgccaacagcagctgcttaaaaagattgaacacgcccggacatgctga

SEQ ID NO: 9994 - RNA, 1395 nt, synthetic construct
  misc_feature 1..1395: note = derived and/or modified sequence opt6 fromN-myc__Homo_sapiens__AAH02712
  source 1..1395: mol_type = other RNA
atgccatcatgttcaacaagcacaatgccaggaatgatatgcaaaaatcctgatctagaattcgacagtttacaaccatgtttctatccagatgaagatgatttttacttcggcggaccagactcaacaccaccaggagaagatatatggaaaaaatttgaattactacccacccccccattatcaccgagtagaggattcgcagaacattcatcagaaccaccaagttgggtaacagaaatgttactcgaaaacgaattatggggaagtcctgcggaagaagatgcttttggactaggcggactaggaggattaacaccaaatccagttatattacaagactgtatgtggtcaggattctccgcacgcgaaaaattagaaagagcagtatcagaaaaactacaacatggcagaggaccaccaacagcaggttcaacagctcaatctcccggagcaggcgcagcaagtccagcaggaagaggacatggaggagccgcaggagcaggacgcgccggagctgcactaccagcagaattagctcatccagcagcagaatgtgtagacccagcagtagtttttccttttcctgtaaataaaagagaaccagccccagtaccagcagctccagcctcagcaccagcagcaggtcccgccgtagcatcaggagcaggaatagcagcaccagcaggagcacctggagtggcacctccacgaccaggtggacgacaaacaagcggtggagatcacaaagcactttcaacctcaggagaagatacattaagtgatagtgatgatgaagacgatgaagaagaagacgaagaagaagaaatagacgtagtcactgtcgaaaaaagacgatcatcatcaaacacaaaagctgtaacaacttttacgattacagtaagaccaaaaaacgccgcactaggtccaggaagagcacaatcatctgaattaatactaaaaagatgtctaccaattcatcaacaacacaattatgcagcaccatcaccatatgttgaaagcgaagatgcaccaccacaaaaaaagattaaatctgaagcatcaccaagaccattaaaaagtgtaataccaccaaaagcaaaatcgttatcccctcgaaactcagattcagaagattcagaacgaagaagaaatcataacattctagaaagacaacgaagaaatgatttaagaagttcattccttacactaagagatcatgttccagaactagtaaaaaatgaaaaagcagcaaaagttgtaattctaaaaaaagcaacagaatatgtacattccttacaagctgaagaacatcaattattacttgaaaaagaaaaattacaagcaagacaacaacaactactaaaaaaaatagaacacgcacgcacatgctaa

SEQ ID NO: 9995 - protein, 112 aa, synthetic construct
  REGION 1..112: note = N-myc__Homo_sapiens__Q9H224
MRGAPGNCVGAEQALARRKRAQTVAIRGHPRPPGPPGDTRAESPPDPLQSAGVLEVGAGPRLPRPPREGSTPGIKTNGAERSPQSPAGRRADAELLHVHHAGHDLQEPRPRV

SEQ ID NO: 9996 - RNA, 339 nt, synthetic construct
  misc_feature 1..339: note = N-myc__Homo_sapiens__AAG40001
  source 1..339: mol_type = other RNA
atgcggggggctcctgggaactgtgttggagccgagcaagcgctagccaggcgcaagcgcgcacagactgtagccatccgaggacacccccgcccccccggcccacccggagacacccgcgcagaatcgcctccggatcccctgcagtcggcgggagtgttggaggtcggcgccggcccccgccttccgcgccccccacgggaaggaagcacccccggtattaaaacgaacggggcggaaagaagccctcagtcgccggccgggaggcgagccgatgccgagctgctccacgtccaccatgccgggcatgatctgcaagaacccagacctcgagtttga

SEQ ID NO: 9997 - RNA, 339 nt, synthetic construct
  misc_feature 1..339: note = derived and/or modified sequence opt1 fromN-myc__Homo_sapiens__AAG40001
  source 1..339: mol_type = other RNA
atgcgcggcgcccccgggaactgcgtgggcgccgagcaggcgctggcccggcgcaagcgggcccagaccgtcgccatccgcgggcacccgcggccgcccggcccgcccggggacacccgcgccgagagcccgcccgaccccctccagtccgcgggcgtgctggaggtgggcgccgggccccggctgccccgcccgccccgggagggcagcacgcccgggatcaagaccaacggcgccgagcgcagcccccagtcccccgccgggcggcgcgcggacgccgagctcctgcacgtccaccacgccggccacgacctgcaggagccccggccccgcgtgtga

SEQ ID NO: 9998 - RNA, 339 nt, synthetic construct
  misc_feature 1..339: note = derived and/or modified sequence opt2 fromN-myc__Homo_sapiens__AAG40001
  source 1..339: mol_type = other RNA
atgcgcggcgcccccggcaactgcgtcggcgccgagcaggccctcgcccgccgcaagcgcgcccagaccgtcgccatccgcggccacccccgcccccccggcccccccggcgacacccgcgccgagtccccccccgaccccctccagtccgccggcgtcctcgaggtcggcgccggcccccgcctcccccgccccccccgcgagggctccacccccggcatcaagaccaacggcgccgagcgctccccccagtcccccgccggccgccgcgccgacgccgagctcctccacgtccaccacgccggccacgacctccaggagccccgcccccgcgtctga

SEQ ID NO: 9999 - RNA, 339 nt, synthetic construct
  misc_feature 1..339: note = derived and/or modified sequence opt3 fromN-myc__Homo_sapiens__AAG40001
  source 1..339: mol_type = other RNA
atgagaggcgcccccgggaactgcgtgggagctgagcaggcactggccaggcggaagcgcgcgcaaaccgtcgctatccgaggtcaccctcgtccaccggggccccctggcgacacaagagccgaaagcccacccgatcctctccagtccgcaggagttcttgaggtgggcgccggtccaaggctgccccggcctccacgcgaagggtctactccgggaattaaaacgaatggcgctgagagatcaccccagagtcctgcaggcaggcgggccgacgctgaattgttacatgtacaccatgccgggcacgatctgcaggagccacgcccccgagtgtga

SEQ ID NO: 10000 - RNA, 339 nt, synthetic construct
  misc_feature 1..339: note = derived and/or modified sequence opt4 fromN-myc__Homo_sapiens__AAG40001
  source 1..339: mol_type = other RNA
atgagaggcgcccccggcaactgcgtgggcgccgagcaggccctggccagaagaaagagagcccagaccgtggccatcagaggccaccccagaccccccggcccccccggcgacaccagagccgagagcccccccgaccccctgcagagcgccggcgtgctggaggtgggcgccggccccagactgcccagaccccccagagagggcagcacccccggcatcaagaccaacggcgccgagagaagcccccagagccccgccggcagaagagccgacgccgagctgctgcacgtgcaccacgccggccacgacctgcaggagcccagacccagagtgtga

SEQ ID NO: 10001 - RNA, 339 nt, synthetic construct
  misc_feature 1..339: note = derived and/or modified sequence opt5 fromN-myc__Homo_sapiens__AAG40001
  source 1..339: mol_type = other RNA
atgagaggcgcccccgggaactgcgtgggagctgagcaggccctggcgcggcgcaagagagctcaaaccgtcgccatccggggccaccctcgcccgcccgggcctcccggagacacaagagccgaaagccctcccgatcctctccagtccgctggcgttctggaggtgggggccggaccgcggcttccccgccctcccagagaaggctctacgcctggcattaaaaccaatggggctgagcggagcccccagtccccggccggacgcagagcggacgccgaactgctccatgtgcaccatgctggccacgatctgcaggagcctcggccccgcgtctga

SEQ ID NO: 10002 - RNA, 339 nt, synthetic construct
  misc_feature 1..339: note = derived and/or modified sequence opt6 fromN-myc__Homo_sapiens__AAG40001
  source 1..339: mol_type = other RNA
atgagaggagcaccaggaaactgtgtaggagcagaacaagcattagcaagaagaaaaagagcacaaacagtagcaataagaggacacccaagaccaccaggaccaccaggagatacaagagcagaatcacctccagatccattacaatcagcaggagtattagaagtaggagcaggaccaagattaccaagaccaccaagagaaggatcaacaccaggaataaaaacaaacggagcagaaagatcaccacaatcaccagcaggaagaagagcagatgcagaactattacacgtacaccatgcaggacacgatttacaagaaccaagaccaagagtataa

SEQ ID NO: 10003 - protein, 86 aa, synthetic construct
  REGION 1..86: note = N-myc__Homo_sapiens__V9H1L1
MRGAPGNCVGAEQALARRKRAQTVAIRGHPRPPGPPGDTRAESPPDPLQSAGGKEQGLQTARRPGKRRAPGQGKPWTGLRRAHRAP

SEQ ID NO: 10004 - RNA, 261 nt, synthetic construct
  misc_feature 1..261: note = N-myc__Homo_sapiens__CAA68677
  source 1..261: mol_type = other RNA
atgcggggggctcctgggaactgtgttggagccgagcaagcgctagccaggcgcaagcgcgcacagactgtagccatccgaggacacccccgcccccccggcccacccggagacacccgcgcagaatcgcctccggatcccctgcagtcggcgggaggtaaggagcagggcttgcaaaccgcccggcgcccagggaagcgacgagcgccggggcaaggcaagccctggacgggattgcgacgtgcgcaccgggcgccctaa

SEQ ID NO: 10005 - RNA, 261 nt, synthetic construct
  misc_feature 1..261: note = derived and/or modified sequence opt1 fromN-myc__Homo_sapiens__CAA68677
  source 1..261: mol_type = other RNA
atgcgcggcgcccccgggaactgcgtgggcgccgagcaggcgctggcccggcgcaagcgggcccagaccgtcgccatccgcgggcacccccggccgcccggcccgcccggggacacccgcgccgagagcccgcccgaccccctccagtccgcgggcggcaaggagcaggggctgcagacggcccggcgccccggcaagcggcgcgcccccgggcagggcaagccctggaccgggctgcggcgcgcccaccgggcgccctga

SEQ ID NO: 10006 - RNA, 261 nt, synthetic construct
  misc_feature 1..261: note = derived and/or modified sequence opt2 fromN-myc__Homo_sapiens__CAA68677
  source 1..261: mol_type = other RNA
atgcgcggcgcccccggcaactgcgtcggcgccgagcaggccctcgcccgccgcaagcgcgcccagaccgtcgccatccgcggccacccccgcccccccggcccccccggcgacacccgcgccgagtccccccccgaccccctccagtccgccggcggcaaggagcagggcctccagaccgcccgccgccccggcaagcgccgcgcccccggccagggcaagccctggaccggcctccgccgcgcccaccgcgccccctga

SEQ ID NO: 10007 - RNA, 261 nt, synthetic construct
  misc_feature 1..261: note = derived and/or modified sequence opt3 fromN-myc__Homo_sapiens__CAA68677
  source 1..261: mol_type = other RNA
atgagaggcgcccccgggaactgcgtgggagctgagcaggcactggccaggcggaagcgcgcgcaaaccgtcgctatccgaggtcaccctcgtccaccggggccccctggcgacacaagagccgaaagcccacccgatcctctccagtccgcaggaggcaaagagcagggtcttcagactgccaggcggccagggaagcgcagagctcccggacaaggcaaaccttggacgggcctgaggcgggcacatcgcgccccatga

SEQ ID NO: 10008 - RNA, 261 nt, synthetic construct
  misc_feature 1..261: note = derived and/or modified sequence opt4 fromN-myc__Homo_sapiens__CAA68677
  source 1..261: mol_type = other RNA
atgagaggcgcccccggcaactgcgtgggcgccgagcaggccctggccagaagaaagagagcccagaccgtggccatcagaggccaccccagaccccccggcccccccggcgacaccagagccgagagcccccccgaccccctgcagagcgccggcggcaaggagcagggcctgcagaccgccagaagacccggcaagagaagagcccccggccagggcaagccctggaccggcctgagaagagcccacagagccccctga

SEQ ID NO: 10009 - RNA, 261 nt, synthetic construct
  misc_feature 1..261: note = derived and/or modified sequence opt5 fromN-myc__Homo_sapiens__CAA68677
  source 1..261: mol_type = other RNA
atgagaggcgcccccgggaactgcgtgggagctgagcaggccctggcgcggcgcaagagagctcaaaccgtcgccatccggggccaccctcgcccgcccgggcctcccggagacacaagagccgaaagccctcccgatcctctccagtccgctggcgggaaagagcagggactgcagacggcccggcgcccgggcaagagacgggctcccggccaagggaaaccttggaccggacttcgcagagcccatcgggcgccctga

SEQ ID NO: 10010 - RNA, 261 nt, synthetic construct
  misc_feature 1..261: note = derived and/or modified sequence opt6 fromN-myc__Homo_sapiens__CAA68677
  source 1..261: mol_type = other RNA
atgagaggagcaccaggaaattgcgtaggagcagaacaagcattagcaagaagaaaaagagcacaaacagtagcaataagaggacatccaagaccaccaggaccaccaggagacacaagagcagaatcaccaccagacccactacaaagtgcaggaggaaaagaacaaggactacaaacagcaagaagaccaggaaaaagaagagcaccaggacaaggaaaaccatggacaggattaagaagagcacatagagcaccataa

SEQ ID NO: 10011 - protein, 360 aa, synthetic construct
  REGION 1..360: note = Oct3__Homo_sapiens__Q01860
MAGHLASDFAFSPPPGGGGDGPGGPEPGWVDPRTWLSFQGPPGGPGIGPGVGPGSEVWGIPPCPPPYEFCGGMAYCGPQVGVGLVPQGGLETSQPEGEAGVGVESNSDGASPEPCTVTPGAVKLEKEKLEQNPEESQDIKALQKELEQFAKLLKQKRITLGYTQADVGLTLGVLFGKVFSQTTICRFEALQLSFKNMCKLRPLLQKWVEEADNNENLQEICKAETLVQARKRKRTSIENRVRGNLENLFLQCPKPTLQQISHIAQQLGLEKDVVRVWFCNRRQKGKRSSSDYAQREDFEAAGSPFSGGPVSFPLAPGPHFGTPGYGSPHFTALYSSVPFPEGEAFPPVSVTTLGSPMHSN

SEQ ID NO: 10012 - RNA, 1083 nt, synthetic construct
  misc_feature 1..1083: note = Oct3__Homo_sapiens__AAI17436
  source 1..1083: mol_type = other RNA
atggcgggacacctggcttcggatttcgccttctcgccccctccaggtggtggaggtgatgggccaggggggccggagccgggctgggttgatcctcggacctggctaagcttccaaggccctcctggagggccaggaatcgggccgggggttgggccaggctctgaggtgtgggggattcccccatgccccccgccgtatgagttctgtggggggatggcgtactgtgggccccaggttggagtggggctagtgccccaaggcggcttggagacctctcagcctgagggcgaagcaggagtcggggtggagagcaactccgatggggcctccccggagccctgcaccgtcacccctggtgccgtgaagctggagaaggagaagctggagcaaaacccggaggagtcccaggacatcaaagctctgcagaaagaactcgagcaatttgccaagctcctgaagcagaagaggatcaccctgggatatacacaggccgatgtggggctcaccctgggggttctatttgggaaggtattcagccaaacgaccatctgccgctttgaggctctgcagcttagcttcaagaacatgtgtaagctgcggcccttgctgcagaagtgggtggaggaagctgacaacaatgaaaatcttcaggagatatgcaaagcagaaaccctcgtgcaggcccgaaagagaaagcgaaccagtatcgagaaccgagtgagaggcaacctggagaatttgttcctgcagtgcccgaaacccacactgcagcagatcagccacatcgcccagcagcttgggctcgagaaggatgtggtccgagtgtggttctgtaaccggcgccagaagggcaagcgatcaagcagcgactatgcacaacgagaggattttgaggctgctgggtctcctttctcagggggaccagtgtcctttcctctggccccagggccccattttggtaccccaggctatgggagccctcacttcactgcactgtactcctcggtccctttccctgagggggaagcctttccccctgtctccgtcaccactctgggctctcccatgcattcaaactga

SEQ ID NO: 10013 - RNA, 1083 nt, synthetic construct
  misc_feature 1..1083: note = derived and/or modified sequence opt1 fromOct3__Homo_sapiens__AAI17436
  source 1..1083: mol_type = other RNA
atggccggccacctggccagcgacttcgcgttctccccgccgcccgggggcgggggcgacgggcccggcggccccgagccggggtgggtggacccccgcacctggctcagcttccagggcccgcccgggggccccgggatcggccccggcgtcgggcccggctccgaggtgtgggggatcccgccctgcccgccgccctacgagttctgcggcggcatggcctactgcgggccccaggtgggcgtcgggctggtgccccagggcgggctggagaccagccagcccgagggcgaggccggcgtgggggtcgagtccaacagcgacggcgcctcccccgagccctgcacggtgacccccggggccgtgaagctcgagaaggagaagctggagcagaaccccgaggagagccaggacatcaaggcgctgcagaaggagctcgagcagttcgccaagctgctgaagcagaagcggatcaccctcggctacacccaggccgacgtcgggctgacgctgggcgtcctcttcggcaaggtgttctcccagaccaccatctgccgcttcgaggccctgcagctgagcttcaagaacatgtgcaagctccggcccctgctgcagaagtgggtggaggaggcggacaacaacgagaacctccaggagatctgcaaggccgagaccctggtgcaggcccgcaagcggaagcgcacgtccatcgagaaccgggtgcgcgggaacctggagaacctcttcctgcagtgccccaagcccaccctgcagcagatcagccacatcgcccagcagctcggcctggagaaggacgtcgtgcgggtgtggttctgcaaccgccggcagaaggggaagcgctccagctccgactacgcccagcgggaggacttcgaggcggccggcagccccttctccgggggccccgtcagcttcccgctggcccccggcccccacttcgggaccccgggctacgggagcccccacttcaccgccctctactccagcgtgcccttccccgagggcgaggccttcccgcccgtgtccgtcacgaccctgggcagccccatgcactccaactga

SEQ ID NO: 10014 - RNA, 1083 nt, synthetic construct
  misc_feature 1..1083: note = derived and/or modified sequence opt2 fromOct3__Homo_sapiens__AAI17436
  source 1..1083: mol_type = other RNA
atggccggccacctcgcctccgacttcgccttctcccccccccccggcggcggcggcgacggccccggcggccccgagcccggctgggtcgacccccgcacctggctctccttccagggcccccccggcggccccggcatcggccccggcgtcggccccggctccgaggtctggggcatccccccctgcccccccccctacgagttctgcggcggcatggcctactgcggcccccaggtcggcgtcggcctcgtcccccagggcggcctcgagacctcccagcccgagggcgaggccggcgtcggcgtcgagtccaactccgacggcgcctcccccgagccctgcaccgtcacccccggcgccgtcaagctcgagaaggagaagctcgagcagaaccccgaggagtcccaggacatcaaggccctccagaaggagctcgagcagttcgccaagctcctcaagcagaagcgcatcaccctcggctacacccaggccgacgtcggcctcaccctcggcgtcctcttcggcaaggtcttctcccagaccaccatctgccgcttcgaggccctccagctctccttcaagaacatgtgcaagctccgccccctcctccagaagtgggtcgaggaggccgacaacaacgagaacctccaggagatctgcaaggccgagaccctcgtccaggcccgcaagcgcaagcgcacctccatcgagaaccgcgtccgcggcaacctcgagaacctcttcctccagtgccccaagcccaccctccagcagatctcccacatcgcccagcagctcggcctcgagaaggacgtcgtccgcgtctggttctgcaaccgccgccagaagggcaagcgctcctcctccgactacgcccagcgcgaggacttcgaggccgccggctcccccttctccggcggccccgtctccttccccctcgcccccggcccccacttcggcacccccggctacggctccccccacttcaccgccctctactcctccgtccccttccccgagggcgaggccttcccccccgtctccgtcaccaccctcggctcccccatgcactccaactga

SEQ ID NO: 10015 - RNA, 1083 nt, synthetic construct
  misc_feature 1..1083: note = derived and/or modified sequence opt3 fromOct3__Homo_sapiens__AAI17436
  source 1..1083: mol_type = other RNA
atggccggccacctggctagcgacttcgcatttagtccccctccagggggaggtggcgatgggccgggaggccccgaacctggttgggtggacccaagaacctggctctctttccaggggccccctggaggcccaggcatcgggcccggagtcggtcctggctcagaagtttgggggattccaccgtgtccccctccatacgagttttgcggaggcatggcctattgcggtccccaagtgggggtaggacttgtgcctcagggcggcctggaaacaagtcagccagagggggaagcgggagtcggtgtggagagcaactccgatggcgcttctcccgagccgtgtactgttacgcctggggccgtgaagttggaaaaagagaagttagaacagaatcccgaggagtcgcaagacataaaagcactgcagaaggaactagagcagttcgccaaactcctgaagcagaagaggatcacccttggatacacacaagctgatgtcggcctgactttgggtgtgctctttgggaaagtattctcacagaccacaatttgccggtttgaagcactgcagctgagcttcaagaacatgtgtaaactccgcccattactgcagaagtgggttgaggaagccgacaataacgagaatcttcaagagatctgcaaagctgaaaccttggtgcaggcccgaaagcgtaagagaacttccattgagaacagggtccggggcaatctggaaaacctatttctccagtgtcctaaacccacactgcaacagatctcccatatagcgcagcagcttggactggagaaggatgtggtgcgcgtctggttctgcaatagaaggcaaaaaggcaagcggtctagctccgactatgcacagcgcgaagattttgaggccgctgggtcaccattcagtggaggtcccgttagctttcctttggccccaggcccgcacttcgggacccccggatacggctctcctcatttcacggcactctattcctcagtgccatttcccgagggtgaggctttccctccagtaagcgtgactaccctggggagtcccatgcactctaactga

SEQ ID NO: 10016 - RNA, 1083 nt, synthetic construct
  misc_feature 1..1083: note = derived and/or modified sequence opt4 fromOct3__Homo_sapiens__AAI17436
  source 1..1083: mol_type = other RNA
atggccggccacctggccagcgacttcgccttcagccccccccccggcggcggcggcgacggccccggcggccccgagcccggctgggtggaccccagaacctggctgagcttccagggcccccccggcggccccggcatcggccccggcgtgggccccggcagcgaggtgtggggcatccccccctgcccccccccctacgagttctgcggcggcatggcctactgcggcccccaggtgggcgtgggcctggtgccccagggcggcctggagaccagccagcccgagggcgaggccggcgtgggcgtggagagcaacagcgacggcgccagccccgagccctgcaccgtgacccccggcgccgtgaagctggagaaggagaagctggagcagaaccccgaggagagccaggacatcaaggccctgcagaaggagctggagcagttcgccaagctgctgaagcagaagagaatcaccctgggctacacccaggccgacgtgggcctgaccctgggcgtgctgttcggcaaggtgttcagccagaccaccatctgcagattcgaggccctgcagctgagcttcaagaacatgtgcaagctgagacccctgctgcagaagtgggtggaggaggccgacaacaacgagaacctgcaggagatctgcaaggccgagaccctggtgcaggccagaaagagaaagagaaccagcatcgagaacagagtgagaggcaacctggagaacctgttcctgcagtgccccaagcccaccctgcagcagatcagccacatcgcccagcagctgggcctggagaaggacgtggtgagagtgtggttctgcaacagaagacagaagggcaagagaagcagcagcgactacgcccagagagaggacttcgaggccgccggcagccccttcagcggcggccccgtgagcttccccctggcccccggcccccacttcggcacccccggctacggcagcccccacttcaccgccctgtacagcagcgtgcccttccccgagggcgaggccttcccccccgtgagcgtgaccaccctgggcagccccatgcacagcaactga

SEQ ID NO: 10017 - RNA, 1083 nt, synthetic construct
  misc_feature 1..1083: note = derived and/or modified sequence opt5 fromOct3__Homo_sapiens__AAI17436
  source 1..1083: mol_type = other RNA
atggccggccacctggctagcgacttcgccttttccccgcctcccgggggaggcggggatggacccggcgggcctgagcccggatgggtggaccctagaacctggctctctttccaggggccccctggcggcccgggaatcggccccggggtcggacctggcagcgaagtttgggggattcccccttgtcccccgccttacgagttttgcggaggcatggcgtattgcggcccccaagtgggggtgggactggtccctcagggcgggcttgaaacatcccagcccgagggagaagctggcgtgggggttgagtctaacagcgatggagcctcccccgagccttgtacggtgaccccgggcgccgtcaagctggaaaaagagaagctcgaacagaatcccgaggagtctcaagacatcaaagctctgcagaaggaacttgagcagttcgccaaactgctcaagcagaagcggattacactgggctacacccaagctgatgtggggctgacactcggagttctgtttggcaaagtgttcagccagaccacaatctgccgctttgaagcccttcagctgtccttcaagaacatgtgtaaactcagacctctgcttcagaagtgggtcgaggaagcggacaataacgagaatctgcaagagatttgcaaagccgaaaccctcgtgcaggctcggaagcgcaagagaacgagcatcgagaaccgggtgcgcgggaatctggaaaacctgtttctccagtgtcccaaacctaccctgcaacagatctctcatattgcccagcagcttggactggagaaggatgtcgttagagtgtggttctgcaatcggcgccaaaaaggcaagagatccagctctgactatgctcagcgggaagattttgaggccgcggggtcccccttcagcggcggaccggtgtcttttcctctcgcccccggccctcacttcgggacacccggatacggctcccctcatttcaccgctctgtatagctccgtcccctttccggagggggaagccttccctcccgtgtctgttacaacccttggaagccccatgcactccaactga

SEQ ID NO: 10018 - RNA, 1083 nt, synthetic construct
  misc_feature 1..1083: note = derived and/or modified sequence opt6 fromOct3__Homo_sapiens__AAI17436
  source 1..1083: mol_type = other RNA
atggcaggacatctagcatcagattttgcatttagcccaccaccaggaggtggaggagacggtccaggaggaccagaaccaggatgggtagatccaagaacatggttatcgtttcaaggaccaccaggcggacctggaataggaccaggagtaggcccaggatcagaagtatggggaatacctccatgcccaccaccatatgaattctgtggaggaatggcatactgtggaccacaagtaggagtaggtttagtaccacaaggtggattagaaacctcacaaccagaaggtgaagcaggagtaggagtagaatcaaattcagatggagcatcaccagaaccttgtacagttacaccaggagcagttaaacttgaaaaagaaaaattagaacaaaacccagaagaatcacaagatataaaagcattacaaaaagaattagaacaattcgcaaaattattgaaacaaaaaagaataacactcggatacacacaagcagatgtaggattaactttaggagtactatttggaaaagtatttagtcaaacaacaatatgtagattcgaagcattacaattatcctttaaaaatatgtgcaaactaagaccactactacaaaaatgggtagaagaagcagataataatgaaaaccttcaagaaatatgtaaagcagaaacactagtacaagcaagaaaaagaaaaagaacatcaatagaaaatagagtaagaggtaatctagaaaatttatttcttcaatgtcccaaaccaacactacaacaaatatcacacatagcacaacaattaggattagaaaaagatgtagtaagagtatggttttgtaatcgaagacaaaaaggaaaaagatcatcatcagattatgcacaaagggaagatttcgaagcagcaggaagtccatttagtggaggaccagtctcatttccattagcacccggtccacattttggaacaccaggatatggatcaccacattttacagctttatattcaagtgtaccatttcctgaaggtgaagctttcccaccagtatcagttacaacattaggatcaccaatgcattcaaactaa

SEQ ID NO: 10019 - protein, 233 aa, synthetic construct [sequence omitted]

SEQ ID NO: 10020 - RNA, 702 nt, synthetic construct
  misc_feature 1..702: note = Sox15__Homo_sapiens__AAH00985
  source 1..702: mol_type = other RNA
atggcgctaccaggctcctcacaggaccaggcctggagcctggagcctccggctgccacggctgctgcctcctcatcttcgggaccccaggagcgggagggcgctgggagccccgcggcccccgggacgctgcccctggagaaggtgaagcggccgatgaacgcgttcatggtgtggagctccgctcagcgccgccagatggcgcagcagaaccccaagatgcacaactccgagatctccaagcgcctgggcgcgcagtggaagctgctggacgaggacgagaagcggcccttcgtggaggaggccaagcggctccgcgcccgacacctgcgcgactaccccgactacaagtaccggcctcggcgcaaggccaagagctcgggcgccggaccttcccgctgcggacagggaagaggcaacctggccagcggcggcccgctctgggggccggggtacgcgaccacccaaccgagcagaggctttgggtacagaccccccagctactcgacagcctacctgcctggcagctatggctcttcccactgcaaactggaagccccctcaccgtgctccctccctcagagtgaccctaggctccagggggaactgctgcccacctatacccactacctgccccctggctctcccactccatacaaccctccccttgctggtgcccccatgcccctaacccacctctaa

SEQ ID NO: 10021 - RNA, 702 nt, synthetic construct
  misc_feature 1..702: note = derived and/or modified sequence opt1 fromSox15__Homo_sapiens__AAH00985
  source 1..702: mol_type = other RNA
atggccctgcccggcagctcccaggaccaggcctggagcctcgagccgcccgcggccaccgccgccgcctccagctccagcgggccccaggagcgcgagggcgcggggtcccccgccgccccgggcaccctgcccctggagaaggtgaagcggcccatgaacgccttcatggtctggagctccgcgcagcgccggcagatggcccagcagaaccccaagatgcacaacagcgagatctccaagcgcctcggggcccagtggaagctgctggacgaggacgagaagcggccgttcgtggaggaggccaagcgcctccgggcccgccacctccgggactaccccgactacaagtaccgcccccggcgcaaggccaagagctccggcgcgggccccagccggtgcgggcagggccgcgggaacctggcctccggcgggccgctgtggggccccggctacgccacgacccagcccagccgggggttcggctaccggcccccgtcctacagcaccgcctacctgcccgggtcctacggcagcagccactgcaagctggaggcgccctccccctgcagcctcccgcagtccgacccccgcctgcagggcgagctgctccccacctacacgcactacctgcccccggggagccccaccccctacaacccgcccctggccggcgcccccatgcccctcacccacctgtga

SEQ ID NO: 10022 - RNA, 702 nt, synthetic construct
  misc_feature 1..702: note = derived and/or modified sequence opt2 fromSox15__Homo_sapiens__AAH00985
  source 1..702: mol_type = other RNA
atggccctccccggctcctcccaggaccaggcctggtccctcgagccccccgccgccaccgccgccgcctcctcctcctccggcccccaggagcgcgagggcgccggctcccccgccgcccccggcaccctccccctcgagaaggtcaagcgccccatgaacgccttcatggtctggtcctccgcccagcgccgccagatggcccagcagaaccccaagatgcacaactccgagatctccaagcgcctcggcgcccagtggaagctcctcgacgaggacgagaagcgccccttcgtcgaggaggccaagcgcctccgcgcccgccacctccgcgactaccccgactacaagtaccgcccccgccgcaaggccaagtcctccggcgccggcccctcccgctgcggccagggccgcggcaacctcgcctccggcggccccctctggggccccggctacgccaccacccagccctcccgcggcttcggctaccgccccccctcctactccaccgcctacctccccggctcctacggctcctcccactgcaagctcgaggccccctccccctgctccctcccccagtccgacccccgcctccagggcgagctcctccccacctacacccactacctcccccccggctcccccaccccctacaacccccccctcgccggcgcccccatgcccctcacccacctctga

SEQ ID NO: 10023 - RNA, 702 nt, synthetic construct
  misc_feature 1..702: note = derived and/or modified sequence opt3 fromSox15__Homo_sapiens__AAH00985
  source 1..702: mol_type = other RNA
atggccctgcccggcagctcccaggaccaggcttggtctctcgagcctccagcagccaccgcggctgcctcaagtagctccgggccgcaagaaagagagggagcaggttctcccgccgctcctggcacacttccactggaaaaggtgaaaaggcccatgaacgcattcatggtctggtcgtcagcccagcggcgccagatggctcaacagaaccctaagatgcacaacagcgagatcagtaaacgattgggggcccagtggaagttactggatgaagacgagaaacgtccatttgttgaggaagcgaagagactaagggcacggcatctccgcgattaccccgactataagtacagacctaggcggaaagccaagtcctctggagctggcccaagccgctgcggtcaggggcgaggaaatctggcctccggcggcccgctttgggggcccggatatgcaactacgcaaccttcaagaggtttcggctacaggccacccagttatagcaccgcttacctgcctgggtcttatggatcctcacactgtaaattggaggccccaagcccctgcagtctcccgcagtctgatcctcggctgcagggcgaactgctccccacatacactcattacttaccacctggttcccccaccccatataatccccctctggcgggggccccaatgccgcttacacacttgtga

SEQ ID NO: 10024 - RNA, 702 nt, synthetic construct
  misc_feature 1..702: note = derived and/or modified sequence opt4 fromSox15__Homo_sapiens__AAH00985
  source 1..702: mol_type = other RNA
atggccctgcccggcagcagccaggaccaggcctggagcctggagccccccgccgccaccgccgccgccagcagcagcagcggcccccaggagagagagggcgccggcagccccgccgcccccggcaccctgcccctggagaaggtgaagagacccatgaacgccttcatggtgtggagcagcgcccagagaagacagatggcccagcagaaccccaagatgcacaacagcgagatcagcaagagactgggcgcccagtggaagctgctggacgaggacgagaagagacccttcgtggaggaggccaagagactgagagccagacacctgagagactaccccgactacaagtacagacccagaagaaaggccaagagcagcggcgccggccccagcagatgcggccagggcagaggcaacctggccagcggcggccccctgtggggccccggctacgccaccacccagcccagcagaggcttcggctacagaccccccagctacagcaccgcctacctgcccggcagctacggcagcagccactgcaagctggaggcccccagcccctgcagcctgccccagagcgaccccagactgcagggcgagctgctgcccacctacacccactacctgccccccggcagccccaccccctacaacccccccctggccggcgcccccatgcccctgacccacctgtga

SEQ ID NO: 10025 - RNA, 702 nt, synthetic construct
  misc_feature 1..702: note = derived and/or modified sequence opt5 fromSox15__Homo_sapiens__AAH00985
  source 1..702: mol_type = other RNA
atggccctgcccggcagctcccaggaccaggcttggtctctcgagcctccggccgcgaccgctgccgccagctcctctagcgggccccaagaaagagagggagctggctcccctgccgctcccgggacactgcctcttgaaaaggtgaaacggcccatgaacgccttcatggtctggtctagcgcgcagcgcagacagatggcccaacagaatcctaagatgcacaactccgagatcagcaaacggctgggagctcagtggaagctcctggatgaagacgagaaacgcccgtttgttgaggaagccaagagacttcgggctcgccatctgagagattaccccgactataagtaccggcctcgcagaaaagccaagtcttccggcgcggggcccagccggtgcggacagggccgcggcaatctcgcctctgggggacctctgtggggccccgggtatgctacgacccaaccgtccagaggattcggctaccggcctcccagctattctacagcctacctgcctgggtcctatggaagctcccactgtaaactcgaggctccctctccctgcagcctgcctcagtccgatccgcgccttcagggcgaactgctccccacctacacacattacctgcctcccggcagccctaccccctataacccgcctcttgccggggcccccatgcctctgacacacctctga

SEQ ID NO: 10026 - RNA, 702 nt, synthetic construct
  misc_feature 1..702: note = derived and/or modified sequence opt6 fromSox15__Homo_sapiens__AAH00985
  source 1..702: mol_type = other RNA
atggcattaccaggatcatctcaagaccaagcatggtcattagaaccaccagcagcaacagctgcagcatcaagtagctcaggaccacaagaaagagaaggagcaggctcacccgcagcaccaggaacattaccactagaaaaagtaaaaagacccatgaacgcattcatggtctggagctcagcacaaagaagacaaatggcccaacaaaatccaaaaatgcacaattcagaaatatccaaaagattaggagcacaatggaaattattagatgaagatgaaaaaagaccatttgtagaagaagcaaaaagacttagagccagacacctaagagattatccagattacaaatacagaccaagaagaaaagcaaaaagttctggagcaggacctagcagatgtggacaaggaagaggaaacctagcatcaggaggacccctatggggaccaggatacgcaacaacacaaccatcaagaggatttggatatagaccaccatcttactcaacagcatacttaccaggaagctatggatcatcccattgcaaactagaagcaccaagcccatgttcactaccacaatcagacccaagactacaaggagaattactaccaacatatacacattacctaccacctggatcaccaacaccatataatccaccattagcaggagcaccaatgccactaacacacttataa

SEQ ID NO: 10027 - protein, 391 aa, synthetic construct
  REGION 1..391: note = Sox1__Homo_sapiens__O00570
MYSMMMETDLHSPGGAQAPTNLSGPAGAGGGGGGGGGGGGGGGAKANQDRVKRPMNAFMVWSRGQRRKMAQENPKMHNSEISKRLGAEWKVMSEAEKRPFIDEAKRLRALHMKEHPDYKYRPRRKTKTLLKKDKYSLAGGLLAAGAGGGGAAVAMGVGVGVGAAAVGQRLESPGGAAGGGYAHVNGWANGAYPGSVAAAAAAAAMMQEAQLAYGQHPGAGGAHPHAHPAHPHPHHPHAHPHNPQPMHRYDMGALQYSPISNSQGYMSASPSGYGGLPYGAAAAAAAAAGGAHQNSAVAAAAAAAAASSGALGALGSLVKSEPSGSPPAPAHSRAPCPGDLREMISMYLPAGEGGDPAAAAAAAAQSRLHSLPQHYQGAGAGVNGTVPLTHI

SEQ ID NO: 10028 - RNA, 1176 nt, synthetic construct
  misc_feature 1..1176: note = Sox1__Homo_sapiens__EAX09158
  source 1..1176: mol_type = other RNA
atgtacagcatgatgatggagaccgacctgcactcgcccggcggcgcccaggcccccacgaacctctcgggccccgccggggcgggcggcggcgggggcggaggcgggggcggcggcggcggcgggggcgccaaggccaaccaggaccgggtcaaacggcccatgaacgccttcatggtgtggtcccgcgggcagcggcgcaagatggcccaggagaaccccaagatgcacaactcggagatcagcaagcgcctgggggccgagtggaaggtcatgtccgaggccgagaagcggccgttcatcgacgaggccaagcggctgcgcgcgctgcacatgaaggagcacccggattacaagtaccggccgcgccgcaagaccaagacgctgctcaagaaggacaagtactcgctggccggcgggctcctggcggccggcgcgggtggcggcggcgcggctgtggccatgggcgtgggcgtgggcgtgggcgcggcggccgtgggccagcgcctggagagcccaggcggcgcggcgggcggcggctacgcgcacgtcaacggctgggccaacggcgcctaccccggctcggtggcggcggcggcggcggccgcggccatgatgcaggaggcgcagctggcctacgggcagcacccgggcgcgggcggcgcgcacccgcacgcgcaccccgcgcacccgcacccgcaccacccgcacgcgcacccgcacaacccgcagcccatgcaccgctacgacatgggcgcgctgcagtacagccccatctccaactcgcagggctacatgagcgcgtcgccctcgggctacggcggcctcccctacggcgccgcggccgccgccgccgccgctgcgggcggcgcgcaccagaactcggccgtggcggcggcggcggcggcggcggccgcgtcgtcgggcgccctgggcgcgctgggctctctggtgaagtcggagcccagcggcagcccgcccgccccagcgcactcgcgggcgccgtgccccggggacctgcgcgagatgatcagcatgtacttgcccgccggcgaggggggcgacccggcggcggcagcagcggccgcggcgcagagccggctgcactcgctgccgcagcactaccagggcgcgggcgcgggcgtgaacggcacggtgcccctgacgcacatctag

SEQ ID NO: 10029 - RNA, 1176 nt, synthetic construct
  misc_feature 1..1176: note = derived and/or modified sequence opt1 fromSox1__Homo_sapiens__EAX09158
  source 1..1176: mol_type = other RNA
atgtacagcatgatgatggagaccgacctgcactcccccggcggggcccaggccccgaccaacctcagcggccccgcgggggccggcgggggcggcgggggcgggggcgggggcggcgggggcgggggcgccaaggccaaccaggaccgcgtgaagcggcccatgaacgccttcatggtctggtcccgcggccagcggcgcaagatggcgcaggagaaccccaagatgcacaacagcgagatctccaagcggctgggggccgagtggaaggtgatgagcgaggccgagaagcgcccgttcatcgacgaggccaagcggctgcgcgcgctccacatgaaggagcaccccgactacaagtaccggccccgccggaagacgaagaccctgctgaagaaggacaagtactccctcgccggcgggctgctggccgccggcgccgggggcggcggggcggccgtggccatgggcgtcggggtgggcgtgggggccgccgcggtcggccagcgcctcgagagccccggcggggccgccggcgggggctacgcccacgtgaacgggtgggccaacggcgcgtacccgggctccgtggccgccgccgccgcggccgccgccatgatgcaggaggcgcagctggcctacgggcagcaccccggcgccgggggcgcccacccccacgcccaccccgcgcacccgcacccccaccacccccacgcccacccccacaacccgcagcccatgcaccggtacgacatgggcgccctgcagtacagccccatctccaacagccaggggtacatgtccgccagcccctccggctacgggggcctcccgtacggggccgcggccgccgccgccgcggccgccggcggcgcccaccagaacagcgcggtcgccgccgccgccgcggccgccgccgcctccagcggggcgctgggcgccctggggtccctcgtcaagagcgagcccagcggctccccgcccgcccccgcccacagccgcgccccctgccccggggacctgcgggagatgatctccatgtacctgcccgcgggcgagggcggggacccggccgccgccgcggccgccgccgcccagagccgcctccactccctgccccagcactaccagggcgcgggggccggcgtgaacgggaccgtgcccctgacccacatctga

SEQ ID NO: 10030 - RNA, 1176 nt, synthetic construct
  misc_feature 1..1176: note = derived and/or modified sequence opt2 fromSox1__Homo_sapiens__EAX09158
  source 1..1176: mol_type = other RNA
atgtactccatgatgatggagaccgacctccactcccccggcggcgcccaggcccccaccaacctctccggccccgccggcgccggcggcggcggcggcggcggcggcggcggcggcggcggcggcggcgccaaggccaaccaggaccgcgtcaagcgccccatgaacgccttcatggtctggtcccgcggccagcgccgcaagatggcccaggagaaccccaagatgcacaactccgagatctccaagcgcctcggcgccgagtggaaggtcatgtccgaggccgagaagcgccccttcatcgacgaggccaagcgcctccgcgccctccacatgaaggagcaccccgactacaagtaccgcccccgccgcaagaccaagaccctcctcaagaaggacaagtactccctcgccggcggcctcctcgccgccggcgccggcggcggcggcgccgccgtcgccatgggcgtcggcgtcggcgtcggcgccgccgccgtcggccagcgcctcgagtcccccggcggcgccgccggcggcggctacgcccacgtcaacggctgggccaacggcgcctaccccggctccgtcgccgccgccgccgccgccgccgccatgatgcaggaggcccagctcgcctacggccagcaccccggcgccggcggcgcccacccccacgcccaccccgcccacccccacccccaccacccccacgcccacccccacaacccccagcccatgcaccgctacgacatgggcgccctccagtactcccccatctccaactcccagggctacatgtccgcctccccctccggctacggcggcctcccctacggcgccgccgccgccgccgccgccgccgccggcggcgcccaccagaactccgccgtcgccgccgccgccgccgccgccgccgcctcctccggcgccctcggcgccctcggctccctcgtcaagtccgagccctccggctccccccccgcccccgcccactcccgcgccccctgccccggcgacctccgcgagatgatctccatgtacctccccgccggcgagggcggcgaccccgccgccgccgccgccgccgccgcccagtcccgcctccactccctcccccagcactaccagggcgccggcgccggcgtcaacggcaccgtccccctcacccacatctga

SEQ ID NO: 10031 - RNA, 1176 nt, synthetic construct
  misc_feature 1..1176: note = derived and/or modified sequence opt3 fromSox1__Homo_sapiens__EAX09158
  source 1..1176: mol_type = other RNA
atgtacagcatgatgatggagaccgacctgcactcccccggcggggcccaggctcctacaaacctctctggaccagccggtgcaggcgggggaggcggtgggggaggcggcgggggaggtggcgggggagcgaaggctaatcaagatagagtgaaaaggccgatgaacgccttcatggtctggtcacggggccagcgccgaaagatggcacaggaaaatcccaaaatgcataacagtgagatcagcaagcgtcttggtgccgaatggaaagttatgtccgaggctgaaaagagaccttttattgacgaggcaaagaggctgcgggccttgcacatgaaagagcatccagattataagtaccgccccagaaggaaaactaagacgttactgaaaaaggacaagtattctctagctgggggactcctggccgcgggcgcaggcgggggaggtgccgctgtggccatgggcgtaggggtgggagtcggcgcagctgccgtgggtcagcggcttgaatcgcctgggggcgcggccggaggcgggtacgcacacgttaatggatgggctaacggtgcctatccaggctcagtggctgccgcagccgctgcggcagccatgatgcaagaggctcagctggcctacgggcagcatcccggagcaggcggtgcccaccctcacgctcatccagcccacccgcatccccaccaccctcatgcacacccacataatccccagcctatgcaccgctatgatatgggggcgttgcaatacagcccaataagtaactcccagggctacatgtctgctagcccctccggatatggcgggctcccgtacggagccgcagccgctgccgcagctgccgcgggtggcgcccatcagaatagcgctgtcgcagccgctgccgcagcggccgctgccagtagcggggcactgggagctctgggctctctcgtgaaatccgaaccttcaggttcacccccagcccctgcacacagtcgagccccctgcccaggggacttaagagagatgatctctatgtatctgcccgctggcgagggaggcgatcctgcggccgcagctgccgccgctgcacagtccaggcttcacagcttgccacaacattaccagggggccggagcgggcgtaaacggtaccgttccgctgacacacatttga

SEQ ID NO: 10032 - RNA, 1176 nt, synthetic construct
  misc_feature 1..1176: note = derived and/or modified sequence opt4 fromSox1__Homo_sapiens__EAX09158
  source 1..1176: mol_type = other RNA
atgtacagcatgatgatggagaccgacctgcacagccccggcggcgcccaggcccccaccaacctgagcggccccgccggcgccggcggcggcggcggcggcggcggcggcggcggcggcggcggcggcgccaaggccaaccaggacagagtgaagagacccatgaacgccttcatggtgtggagcagaggccagagaagaaagatggcccaggagaaccccaagatgcacaacagcgagatcagcaagagactgggcgccgagtggaaggtgatgagcgaggccgagaagagacccttcatcgacgaggccaagagactgagagccctgcacatgaaggagcaccccgactacaagtacagacccagaagaaagaccaagaccctgctgaagaaggacaagtacagcctggccggcggcctgctggccgccggcgccggcggcggcggcgccgccgtggccatgggcgtgggcgtgggcgtgggcgccgccgccgtgggccagagactggagagccccggcggcgccgccggcggcggctacgcccacgtgaacggctgggccaacggcgcctaccccggcagcgtggccgccgccgccgccgccgccgccatgatgcaggaggcccagctggcctacggccagcaccccggcgccggcggcgcccacccccacgcccaccccgcccacccccacccccaccacccccacgcccacccccacaacccccagcccatgcacagatacgacatgggcgccctgcagtacagccccatcagcaacagccagggctacatgagcgccagccccagcggctacggcggcctgccctacggcgccgccgccgccgccgccgccgccgccggcggcgcccaccagaacagcgccgtggccgccgccgccgccgccgccgccgccagcagcggcgccctgggcgccctgggcagcctggtgaagagcgagcccagcggcagcccccccgcccccgcccacagcagagccccctgccccggcgacctgagagagatgatcagcatgtacctgcccgccggcgagggcggcgaccccgccgccgccgccgccgccgccgcccagagcagactgcacagcctgccccagcactaccagggcgccggcgccggcgtgaacggcaccgtgcccctgacccacatctga

SEQ ID NO: 10033 - RNA, 1176 nt, synthetic construct
  misc_feature 1..1176: note = derived and/or modified sequence opt5 fromSox1__Homo_sapiens__EAX09158
  source 1..1176: mol_type = other RNA
atgtacagcatgatgatggagaccgacctgcactcccccggcggggcccaggctcctacaaacctctctggaccggccggcgctgggggaggcgggggaggcggcgggggaggcgggggaggcgggggagcgaaggccaatcaagatagagtgaaacggcccatgaacgccttcatggtctggagccgcggccagagacggaagatggctcaggaaaatcctaaaatgcataactccgagatctctaagcgcctgggcgccgaatggaaagttatgagcgaggctgaaaagagaccctttattgacgaggccaagcggcttcgcgcgctgcacatgaaagagcatcctgattataagtacagaccccggcgcaaaacgaagaccctcctgaaaaaggacaagtattcccttgccgggggactgctcgctgccggcgctgggggaggcggggccgcggtggccatgggagtgggcgtcggcgtgggggctgccgctgttggacagagactggaatctcctggcggggccgccggaggcgggtacgctcacgtgaatggctgggcgaacggagcctatccgggcagcgtcgctgccgccgctgccgcggctgccatgatgcaagaggcccagctggcttacgggcagcatcccggagccggcggggctcaccctcacgcccatcccgcgcaccctcatccccaccacccgcatgcccaccctcataatccccagcctatgcaccggtatgatatgggagctctccaatactcccccatcagcaactctcagggctacatgtccgccagcccctctgggtatggcggactgccttacggcgctgccgcggccgctgccgctgccgccgggggagctcatcaaaattccgcggtggccgctgccgccgctgccgcggctgccagctctggcgcccttggggctctgggatccctcgttaaaagcgaaccgtccggctctccccctgcccccgcgcacagccgcgctccttgccccggggacctgagagagatgatttccatgtatcttccggccggcgagggaggcgatcctgccgctgccgctgccgcggccgctcagagccggctgcactctctcccccagcattaccagggggccggagctggcgtgaacgggacagtccctctgacccacatctga

SEQ ID NO: 10034 - RNA, 1176 nt, synthetic construct
  misc_feature 1..1176: note = derived and/or modified sequence opt6 fromSox1__Homo_sapiens__EAX09158
  source 1..1176: mol_type = other RNA
atgtatagtatgatgatggaaactgatttacatagtccaggaggagctcaagcaccgacaaatctgagtgggcctgcaggagctggaggaggagggggaggtggaggaggaggaggaggaggaggaggtgcaaaagcaaaccaggacagagtaaaaagaccgatgaacgcattcatggtatggagtcgaggacaaagaagaaaaatggcacaagaaaacccaaaaatgcacaatagcgaaatatcaaaaagattaggggcagaatggaaagtaatgtccgaagcagaaaaaagaccatttatagatgaagcgaaaagattaagggcacttcatatgaaagaacacccagattataaatatagaccaaggagaaaaactaaaacattattaaaaaaagataaatatagtttagcgggaggactattagcagcaggagctggaggaggaggtgcagcagtagcaatgggggtaggagtaggagtaggagccgcagcagttggtcaaagattggaaagtccagggggagctgcaggaggaggatacgctcacgtaaatggttgggcaaatggagcatatccaggaagtgtagcagcagcagcagcagcagcagcaatgatgcaagaagcacaactagcttatggacaacatccaggagcagggggagctcatccacacgcacatccagcacatcctcacccacaccatccacatgcacatcctcataatccacagccaatgcatagatacgatatgggtgcattacaatacagcccaataagtaattcacaaggatatatgtcagcatcaccttcaggatatggaggactaccatatggagcagcggcagcagcagccgcagcagcaggaggagcacatcaaaatagtgcagttgcggcagcggcagcggcagcagcagcatcttcaggagctttaggagcattaggatcattagttaaatcagaaccaagcggaagtccaccagcacctgcacatagtagagcaccatgtcctggagatttaagagagatgataagtatgtatttacctgcaggagaaggaggagatccagcagcagcagcagcagcagcagcacaaagtagattacattcgctaccacaacattatcaaggagcaggtgcaggagtaaatggaactgtaccattaacacatatttaa

SEQ ID NO: 10035 - protein, 317 aa, synthetic construct
  REGION 1..317: note = Sox2__Homo_sapiens__P48431
MYNMMETELKPPGPQQTSGGGGGNSTAAAAGGNQKNSPDRVKRPMNAFMVWSRGQRRKMAQENPKMHNSEISKRLGAEWKLLSETEKRPFIDEAKRLRALHMKEHPDYKYRPRRKTKTLMKKDKYTLPGGLLAPGGNSMASGVGVGAGLGAGVNQRMDSYAHMNGWSNGSYSMMQDQLGYPQHPGLNAHGAAQMQPMHRYDVSALQYNSMTSSQTYMNGSPTYSMSYSQQGTPGMALGSMGSVVKSEASSSPPVVTSSSHSRAPCQAGDLRDMISMYLPGAEVPEPAAPSRLHMSQHYQSGPVPGTAINGTLPLSHM

SEQ ID NO: 10036 - RNA, 954 nt, synthetic construct
  misc_feature 1..954: note = Sox2__Homo_sapiens__AAH13923
  source 1..954: mol_type = other RNA
atgtacaacatgatggagacggagctgaagccgccgggcccgcagcaaacttcggggggcggcggcggcaactccaccgcggcggcggccggcggcaaccagaaaaacagcccggaccgcgtcaagcggcccatgaatgccttcatggtgtggtcccgcgggcagcggcgcaagatggcccaggagaaccccaagatgcacaactcggagatcagcaagcgcctgggcgccgagtggaaacttttgtcggagacggagaagcggccgttcatcgacgaggctaagcggctgcgagcgctgcacatgaaggagcacccggattataaataccggccccggcggaaaaccaagacgctcatgaagaaggataagtacacgctgcccggcgggctgctggcccccggcggcaatagcatggcgagcggggtcggggtgggcgccggcctgggcgcgggcgtgaaccagcgcatggacagttacgcgcacatgaacggctggagcaacggcagctacagcatgatgcaggaccagctgggctacccgcagcacccgggcctcaatgcgcacggcgcagcgcagatgcagcccatgcaccgctacgacgtgagcgccctgcagtacaactccatgaccagctcgcagacctacatgaacggctcgcccacctacagcatgtcctactcgcagcagggcacccctggcatggctcttggctccatgggttcggtggtcaagtccgaggccagctccagcccccctgtggttacctcttcctcccactccagggcgccctgccaggccggggacctccgggacatgatcagcatgtatctccccggcgccgaggtgccggaacccgccgcccccagcagacttcacatgtcccagcactaccagagcggcccggtgcccggcacggccattaacggcacactgcccctctcacacatgtga

SEQ ID NO: 10037 - RNA, 954 nt, synthetic construct
  misc_feature 1..954: note = derived and/or modified sequence opt1 fromSox2__Homo_sapiens__AAH13923
  source 1..954: mol_type = other RNA
atgtacaacatgatggagaccgagctgaagcccccgggcccccagcagaccagcgggggcgggggcgggaactccacggccgccgcggccggcggcaaccagaagaacagccccgaccgcgtgaagcggcccatgaacgccttcatggtctggtcccgcgggcagcggcgcaagatggcccaggagaacccgaagatgcacaacagcgagatctccaagcggctcggcgccgagtggaagctgctgagcgagaccgagaagcgccccttcatcgacgaggcgaagcggctccgcgccctgcacatgaaggagcaccccgactacaagtaccggccccgccggaagaccaagaccctgatgaagaaggacaagtacacgctccccgggggcctgctggcccccgggggcaactccatggccagcggcgtgggggtgggcgcggggctcggcgccggcgtcaaccagcgcatggactcctacgcccacatgaacgggtggagcaacggctcctacagcatgatgcaggaccagctggggtacccccagcaccccggcctgaacgcccacggggccgcgcagatgcagccgatgcaccggtacgacgtgtccgccctccagtacaacagcatgacctccagccagacctacatgaacggctcccccacctacagcatgtcctacagccagcagggcacgcccgggatggccctgggcagcatggggtccgtggtcaagagcgaggcctccagctccccgccggtggtgaccagctccagccactcccgcgccccctgccaggcgggcgacctgcgggacatgatcagcatgtacctccccggggccgaggtccccgagccggccgccccctcccgcctgcacatgagccagcactaccagtccggccccgtgcccggcaccgccatcaacgggaccctgccgctcagccacatgtga

SEQ ID NO: 10038 - RNA, 954 nt, synthetic construct
  misc_feature 1..954: note = derived and/or modified sequence opt2 fromSox2__Homo_sapiens__AAH13923
  source 1..954: mol_type = other RNA
atgtacaacatgatggagaccgagctcaagccccccggcccccagcagacctccggcggcggcggcggcaactccaccgccgccgccgccggcggcaaccagaagaactcccccgaccgcgtcaagcgccccatgaacgccttcatggtctggtcccgcggccagcgccgcaagatggcccaggagaaccccaagatgcacaactccgagatctccaagcgcctcggcgccgagtggaagctcctctccgagaccgagaagcgccccttcatcgacgaggccaagcgcctccgcgccctccacatgaaggagcaccccgactacaagtaccgcccccgccgcaagaccaagaccctcatgaagaaggacaagtacaccctccccggcggcctcctcgcccccggcggcaactccatggcctccggcgtcggcgtcggcgccggcctcggcgccggcgtcaaccagcgcatggactcctacgcccacatgaacggctggtccaacggctcctactccatgatgcaggaccagctcggctacccccagcaccccggcctcaacgcccacggcgccgcccagatgcagcccatgcaccgctacgacgtctccgccctccagtacaactccatgacctcctcccagacctacatgaacggctcccccacctactccatgtcctactcccagcagggcacccccggcatggccctcggctccatgggctccgtcgtcaagtccgaggcctcctcctccccccccgtcgtcacctcctcctcccactcccgcgccccctgccaggccggcgacctccgcgacatgatctccatgtacctccccggcgccgaggtccccgagcccgccgccccctcccgcctccacatgtcccagcactaccagtccggccccgtccccggcaccgccatcaacggcaccctccccctctcccacatgtga

SEQ ID NO: 10039 - RNA, 954 nt, synthetic construct
  misc_feature 1..954: note = derived and/or modified sequence opt3 fromSox2__Homo_sapiens__AAH13923
  source 1..954: mol_type = other RNA
atgtacaacatgatggagaccgaactgaagccccctggcccacagcaaacaagcgggggaggtggcggaaattccactgccgctgcagccgggggcaaccagaaaaattctccggacagagtgaagaggcccatgaacgcgttcatggtctggtcacggggtcagcgccgaaaaatggctcaggagaatcctaagatgcacaacagtgaaatcagcaaacgtctcggggccgagtggaaacttctgtccgaaacggagaagagaccatttattgatgaggcaaagaggttgcgggccttacatatgaaggaacaccccgactataaataccgccctagaaggaagaccaaaacactgatgaagaaggataaatatactctaccaggaggcctcctggctcccggcggaaattctatggcatcgggggttggtgtgggcgccgggcttggagctggcgtaaaccaacggatggactcatacgcccatatgaatggttggagcaacgggagttattccatgatgcaggatcagctgggataccctcagcacccaggcttgaatgcgcatggcgcagcccaaatgcagccgatgcaccgctatgacgtgtctgctctccagtacaacagcatgacctcctcacagacatacatgaatgggagtcccacctatagcatgtcttactcccaacagggaactcctggtatggccctgggctcaatggggagcgtcgtgaagagtgaggcatcttccagcccacccgttgtgacatcgtcttcccactcacgagctccttgccaggccggagatctgagagacatgataagtatgtatctcccaggcgcggaagtccccgagccggccgcacctagcaggttacatatgtcccaacactaccagtctggtcccgtgccagggaccgctatcaacggcacgctgcctcttagccatatgtga

SEQ ID NO: 10040 - RNA, 954 nt, synthetic construct
  misc_feature 1..954: note = derived and/or modified sequence opt4 fromSox2__Homo_sapiens__AAH13923
  source 1..954: mol_type = other RNA
atgtacaacatgatggagaccgagctgaagccccccggcccccagcagaccagcggcggcggcggcggcaacagcaccgccgccgccgccggcggcaaccagaagaacagccccgacagagtgaagagacccatgaacgccttcatggtgtggagcagaggccagagaagaaagatggcccaggagaaccccaagatgcacaacagcgagatcagcaagagactgggcgccgagtggaagctgctgagcgagaccgagaagagacccttcatcgacgaggccaagagactgagagccctgcacatgaaggagcaccccgactacaagtacagacccagaagaaagaccaagaccctgatgaagaaggacaagtacaccctgcccggcggcctgctggcccccggcggcaacagcatggccagcggcgtgggcgtgggcgccggcctgggcgccggcgtgaaccagagaatggacagctacgcccacatgaacggctggagcaacggcagctacagcatgatgcaggaccagctgggctacccccagcaccccggcctgaacgcccacggcgccgcccagatgcagcccatgcacagatacgacgtgagcgccctgcagtacaacagcatgaccagcagccagacctacatgaacggcagccccacctacagcatgagctacagccagcagggcacccccggcatggccctgggcagcatgggcagcgtggtgaagagcgaggccagcagcagcccccccgtggtgaccagcagcagccacagcagagccccctgccaggccggcgacctgagagacatgatcagcatgtacctgcccggcgccgaggtgcccgagcccgccgcccccagcagactgcacatgagccagcactaccagagcggccccgtgcccggcaccgccatcaacggcaccctgcccctgagccacatgtga

SEQ ID NO: 10041 - RNA, 954 nt, synthetic construct
  misc_feature 1..954: note = derived and/or modified sequence opt5 fromSox2__Homo_sapiens__AAH13923
  source 1..954: mol_type = other RNA
atgtacaacatgatggagaccgaactgaagccccctggcccgcagcaaacaagcgggggaggcgggggaaattccacggccgctgccgcgggcgggaaccagaaaaattctcccgacagagtgaagcggcctatgaacgctttcatggtctggagccgcggacagagacggaaaatggcccaggagaatcccaagatgcacaactccgaaatctctaaacgcctcggcgccgagtggaagctgcttagcgaaaccgagaagagaccttttattgatgaggctaaacggctgcgcgccctccatatgaaggaacaccccgactataaatacagacctcggcgcaagacaaaaaccctgatgaagaaggataaatatacacttccgggcgggctgctcgctcccggaggcaattccatggcctctggggttggagtgggcgcggggctgggagccggcgtgaaccaaagaatggacagctacgctcatatgaatggctggtccaacgggagctattctatgatgcaggatcagctgggataccctcagcaccccggcctcaatgcccatggggctgcccaaatgcagcctatgcaccggtatgacgtctccgcgctgcagtacaacagcatgacctcttcccagacatacatgaatggaagccccacctattctatgtcctacagccaacagggcacgccggggatggcccttggatccatgggctctgtggttaagagcgaggcttccagctctcctcccgtggtcacctccagctctcacagccgcgccccttgccaggctggcgatctgagagacatgatctccatgtatctccccggggccgaagtgcccgagcctgccgctccgtctcggctgcatatgagccaacactaccagtccggacccgttcctggcacagcgattaacgggacccttcccctgagccatatgtga

SEQ ID NO: 10042 - RNA, 954 nt, synthetic construct
  misc_feature 1..954: note = derived and/or modified sequence opt6 fromSox2__Homo_sapiens__AAH13923
  source 1..954: mol_type = other RNA
atgtacaacatgatggaaacagaattaaaaccaccaggaccacaacaaacatcaggcggaggaggaggaaattcaacagcagcagcggcaggaggaaatcaaaaaaacagcccagatagagtaaaaagaccaatgaatgcattcatggtatggagccgaggacaaagaagaaaaatggcacaagaaaacccaaaaatgcacaactcagaaataagcaaaagactaggagcagaatggaaattactatcagaaacagaaaaacgaccattcatagacgaagcaaaaagactacgagcattacacatgaaagaacatcccgactataaatatagaccaagaagaaagacaaaaacactaatgaaaaaagataaatatacattaccaggaggactattagccccaggaggaaactcaatggcatcaggagttggagttggagcaggactaggagcaggagtaaatcaaagaatggattcatacgcacacatgaacggatggtcaaacggatcatattcaatgatgcaagaccaattaggatacccacaacatccaggattaaacgcacatggagcagcacaaatgcaacccatgcacagatacgatgtatcagcacttcaatataactcaatgacaagctcacaaacatacatgaacggatcaccaacatattctatgagctatagccaacaaggtacacctggaatggcactgggaagtatgggatcagtagtaaaaagcgaagcatcatcatcaccaccagtagtaacatcatcatcccacagtagagcaccatgtcaagcaggagatttaagagacatgatatcaatgtatctaccaggagcagaagtaccagaaccagcagcaccaagcagattacatatgtcacaacattaccaaagtggaccagtaccaggaacagcaataaatggaacactaccattatcacacatgtaa

SEQ ID NO: 10043 - protein, 446 aa, synthetic construct
  REGION 1..446: note = Sox3__Homo_sapiens__P41225
MRPVRENSSGARSPRVPADLARSILISLPFPPDSLAHRPPSSAPTESQGLFTVAAPAPGAPSPPATLAHLLPAPAMYSLLETELKNPVGTPTQAAGTGGPAAPGGAGKSSANAAGGANSGGGSSGGASGGGGGTDQDRVKRPMNAFMVWSRGQRRKMALENPKMHNSEISKRLGADWKLLTDAEKRPFIDEAKRLRAVHMKEYPDYKYRPRRKTKTLLKKDKYSLPSGLLPPGAAAAAAAAAAAAAAASSPVGVGQRLDTYTHVNGWANGAYSLVQEQLGYAQPPSMSSPPPPPALPPMHRYDMAGLQYSPMMPPGAQSYMNVAAAAAAASGYGGMAPSATAAAAAAYGQQPATAAAAAAAAAAMSLGPMGSVVKSEPSSPPPAIASHSQRACLGDLRDMISMYLPPGGDAADAASPLPGGRLHGVHQHYQGAGTAVNGTVPLTHI

SEQ ID NO: 10044 - RNA, 1341 nt, synthetic construct
  misc_feature 1..1341: note = Sox3__Homo_sapiens__AAF73059
  source 1..1341: mol_type = other RNA
atgcgacctgttcgagagaactcatcaggtgcgagaagcccgcgggttcctgctgatttggcgcggagcattttgataagcctacccttcccgccggactcgctggcccacaggcccccaagctccgctccgacggagtcccagggccttttcaccgtggccgctccagccccgggagcgccttctcctcccgccacgctggcgcaccttcttcccgccccggcaatgtacagccttctggagactgaactcaagaaccccgtagggacacccacacaagcggcgggcaccggcggccccgcagccccgggaggcgcaggcaagagtagtgcgaacgcagccggcggcgcgaactcgggcggcggcagcagcggtggtgcgagcggaggtggcgggggtacagaccaggaccgtgtgaaacggcccatgaacgccttcatggtatggtcccgcgggcagcggcgcaaaatggccctggagaaccccaagatgcacaattctgagatcagcaagcgcttgggcgccgactggaaactgctgaccgacgccgagaagcgaccattcatcgacgaggccaagcgacttcgcgccgtgcacatgaaggagtatccggactacaagtaccgaccgcgccgcaagaccaagacgctgctcaagaaagataagtactccctgcccagcggcctcctgcctcccggtgccgcggccgccgccgccgctgccgcggccgcagccgctgccgccagcagtccggtgggcgtgggccagcgcctggacacgtacacgcacgtgaacggctgggccaacggcgcgtactcgctggtgcaggagcagctgggctacgcgcagcccccgagcatgagcagcccgccgccgccgcccgcgctgccgccgatgcaccgctacgacatggccggcctgcagtacagcccaatgatgccgcccggcgctcagagctacatgaacgtcgctgccgcggccgccgccgcctcgggctacgggggcatggcgccctcagccacagcagccgcggccgccgcctacgggcagcagcccgccaccgccgcggccgcagctgcggccgcagccgccatgagcctgggccccatgggctcggtagtgaagtctgagcccagctcgccgccgcccgccatcgcatcgcactctcagcgcgcgtgcctcggcgacctgcgcgacatgatcagcatgtacctgccacccggcggggacgcggccgacgccgcctctccgctgcccggcggtcgcctgcacggcgtgcaccagcactaccagggcgccgggactgcagtcaacggaacggtgccgctgacccacatctga

SEQ ID NO: 10045 - RNA, 1341 nt, synthetic construct
  misc_feature 1..1341: note = derived and/or modified sequence opt1 fromSox3__Homo_sapiens__AAF73059
  source 1..1341: mol_type = other RNA
atgcgccccgtgcgggagaacagctccggcgcccgcagcccgcgggtccccgccgacctggcgcgctccatcctcatcagcctgcccttccccccggactccctggcccaccggccccccagctccgcccccaccgagagccaggggctcttcaccgtggccgccccggcgcccggcgccccctcccccccggccacgctggcccacctgctccccgcgcccgccatgtacagcctgctggagaccgagctcaagaaccccgtggggaccccgacccaggccgccggcacggggggccccgccgcgcccggcggggccggcaagtccagcgccaacgccgccgggggcgcgaactccgggggcggcagctccgggggcgccagcgggggcggcgggggcaccgaccaggaccgcgtcaagcggcccatgaacgccttcatggtgtggtcccgcgggcagcggcgcaagatggccctggagaacccgaagatgcacaacagcgagatctccaagcggctgggcgccgactggaagctcctgaccgacgcggagaagcgccccttcatcgacgaggccaagcggctgcgcgccgtgcacatgaaggagtaccccgactacaagtaccggccccgccggaagaccaagacgctcctgaagaaggacaagtacagcctgccgagcgggctcctgccccccggcgccgccgcggccgccgccgcggccgccgccgccgcggccgccgcctccagccccgtcggcgtggggcagcgcctggacacctacacccacgtgaacggctgggccaacggggcgtactccctcgtccaggagcagctgggctacgcccagccgcccagcatgtccagccccccgcccccccccgccctgccgcccatgcaccggtacgacatggccgggctccagtactcccccatgatgcccccgggcgcccagagctacatgaacgtggcggccgccgccgcggccgcctccggctacgggggcatggcccccagcgccaccgcggccgccgccgccgcgtacgggcagcagcccgccacggccgccgccgcggccgccgccgcggccgccatgtccctgggccccatggggagcgtggtcaagtccgagccgagctcccccccccccgccatcgccagccactcccagcgcgcgtgcctgggcgacctccgggacatgatcagcatgtacctgccgcccggcggggacgccgccgacgccgcctcccccctgcccggcgggcgcctccacggcgtgcaccagcactaccagggcgcggggaccgccgtgaacggcaccgtcccgctgacccacatctga

SEQ ID NO: 10046 - RNA, 1341 nt, synthetic construct
  misc_feature 1..1341: note = derived and/or modified sequence opt2 fromSox3__Homo_sapiens__AAF73059
  source 1..1341: mol_type = other RNA
atgcgccccgtccgcgagaactcctccggcgcccgctccccccgcgtccccgccgacctcgcccgctccatcctcatctccctccccttcccccccgactccctcgcccaccgccccccctcctccgcccccaccgagtcccagggcctcttcaccgtcgccgcccccgcccccggcgccccctccccccccgccaccctcgcccacctcctccccgcccccgccatgtactccctcctcgagaccgagctcaagaaccccgtcggcacccccacccaggccgccggcaccggcggccccgccgcccccggcggcgccggcaagtcctccgccaacgccgccggcggcgccaactccggcggcggctcctccggcggcgcctccggcggcggcggcggcaccgaccaggaccgcgtcaagcgccccatgaacgccttcatggtctggtcccgcggccagcgccgcaagatggccctcgagaaccccaagatgcacaactccgagatctccaagcgcctcggcgccgactggaagctcctcaccgacgccgagaagcgccccttcatcgacgaggccaagcgcctccgcgccgtccacatgaaggagtaccccgactacaagtaccgcccccgccgcaagaccaagaccctcctcaagaaggacaagtactccctcccctccggcctcctcccccccggcgccgccgccgccgccgccgccgccgccgccgccgccgccgccgcctcctcccccgtcggcgtcggccagcgcctcgacacctacacccacgtcaacggctgggccaacggcgcctactccctcgtccaggagcagctcggctacgcccagcccccctccatgtcctcccccccccccccccccgccctcccccccatgcaccgctacgacatggccggcctccagtactcccccatgatgccccccggcgcccagtcctacatgaacgtcgccgccgccgccgccgccgcctccggctacggcggcatggccccctccgccaccgccgccgccgccgccgcctacggccagcagcccgccaccgccgccgccgccgccgccgccgccgccgccatgtccctcggccccatgggctccgtcgtcaagtccgagccctcctcccccccccccgccatcgcctcccactcccagcgcgcctgcctcggcgacctccgcgacatgatctccatgtacctcccccccggcggcgacgccgccgacgccgcctcccccctccccggcggccgcctccacggcgtccaccagcactaccagggcgccggcaccgccgtcaacggcaccgtccccctcacccacatctga

SEQ ID NO: 10047 - RNA, 1341 nt, synthetic construct
  misc_feature 1..1341: note = derived and/or modified sequence opt3 fromSox3__Homo_sapiens__AAF73059
  source 1..1341: mol_type = other RNA
atgagacccgtgagggagaacagctccggcgcccggtctcctcgcgtcccagctgacctggcacgatcaatcctcattagtcttccgtttccccctgatagcctggcccaccgtccaccctcctctgcgcctaccgaatcgcaggggttgttcacagttgctgccccagcacccggagccccttcaccaccggctactttagcacatctgctacccgcccctgctatgtacagcctcctggagacggaacttaagaatccagtgggtacccccacacaagccgcgggcactgggggacctgcagccccaggcggtgctgggaaaagttccgccaacgcagctggaggcgccaattctggcgggggaagctccggtggcgcgtcagggggaggcggtgggaccgaccaggatagagtaaagaggcccatgaacgccttcatggtgtggagtcggggacagcgcagaaaaatggcactggagaatccgaagatgcacaacagcgaaatatctaaaaggttgggcgctgactggaagctcctgacagatgccgagaagcggccttttatcgacgaggctaaacgcctgcgagccgtccatatgaaggaatatcccgattacaaatatagaccaaggcggaagaccaaaactctcttaaagaaggacaaatactccctgccttcaggccttttgcccccaggggcagccgctgcggcagccgctgccgcagccgctgccgcagcggctagcagtcccgtgggagttggtcagcgtctggatacatatacccacgtgaatggctgggccaacggggcatactctctagtccaagagcagctcggatatgcccagcctccatccatgagctcgccgccccctccacccgctctgcctccaatgcatcgctacgacatggccggccttcagtactctcccatgatgccgcctggtgcacaatcctatatgaatgtggctgccgcggccgctgcagcctcagggtacggcggaatggctccaagtgccacggcagcggccgctgccgcatatggccagcagcccgctactgccgcagccgctgcggccgcagctgccgccatgagcctggggcctatgggatccgtagttaagtctgaacccagctcaccacctcccgctattgcaagtcactcccagagagcctgcttgggtgatctcagggacatgatcagcatgtacctgccaccgggcggggatgcggctgacgccgcatctcctttacccggaggccggctgcacggtgtgcatcaacactatcagggggccggcaccgctgtcaacggaacagtgccactcactcatatttga

SEQ ID NO: 10048 - RNA, 1341 nt, synthetic construct
  misc_feature 1..1341: note = derived and/or modified sequence opt4 fromSox3__Homo_sapiens__AAF73059
  source 1..1341: mol_type = other RNA
atgagacccgtgagagagaacagcagcggcgccagaagccccagagtgcccgccgacctggccagaagcatcctgatcagcctgcccttcccccccgacagcctggcccacagaccccccagcagcgcccccaccgagagccagggcctgttcaccgtggccgcccccgcccccggcgcccccagcccccccgccaccctggcccacctgctgcccgcccccgccatgtacagcctgctggagaccgagctgaagaaccccgtgggcacccccacccaggccgccggcaccggcggccccgccgcccccggcggcgccggcaagagcagcgccaacgccgccggcggcgccaacagcggcggcggcagcagcggcggcgccagcggcggcggcggcggcaccgaccaggacagagtgaagagacccatgaacgccttcatggtgtggagcagaggccagagaagaaagatggccctggagaaccccaagatgcacaacagcgagatcagcaagagactgggcgccgactggaagctgctgaccgacgccgagaagagacccttcatcgacgaggccaagagactgagagccgtgcacatgaaggagtaccccgactacaagtacagacccagaagaaagaccaagaccctgctgaagaaggacaagtacagcctgcccagcggcctgctgccccccggcgccgccgccgccgccgccgccgccgccgccgccgccgccgccgccagcagccccgtgggcgtgggccagagactggacacctacacccacgtgaacggctgggccaacggcgcctacagcctggtgcaggagcagctgggctacgcccagccccccagcatgagcagccccccccccccccccgccctgccccccatgcacagatacgacatggccggcctgcagtacagccccatgatgccccccggcgcccagagctacatgaacgtggccgccgccgccgccgccgccagcggctacggcggcatggcccccagcgccaccgccgccgccgccgccgcctacggccagcagcccgccaccgccgccgccgccgccgccgccgccgccgccatgagcctgggccccatgggcagcgtggtgaagagcgagcccagcagccccccccccgccatcgccagccacagccagagagcctgcctgggcgacctgagagacatgatcagcatgtacctgccccccggcggcgacgccgccgacgccgccagccccctgcccggcggcagactgcacggcgtgcaccagcactaccagggcgccggcaccgccgtgaacggcaccgtgcccctgacccacatctga

SEQ ID NO: 10049 - RNA, 1341 nt, synthetic construct
  misc_feature 1..1341: note = derived and/or modified sequence opt5 fromSox3__Homo_sapiens__AAF73059
  source 1..1341: mol_type = other RNA
atgagacccgtgcgggagaactcctccggcgcccgctctcctagagtcccggctgacctggcccggagcatcctcatttccctgcccttccctcccgattctcttgcgcaccgccctcccagctccgctcctaccgaatctcaggggctgtttacagttgccgccccggctcccggagcccctagccctcccgctacgctcgcccatctgcttcccgcgccggccatgtactccctgctcgagaccgaactgaagaatcctgtgggcacacccacccaagctgccgggacaggaggccctgctgcccccgggggagcgggcaaaagctctgccaacgctgccggcggggctaattccggaggcgggagctctggaggcgcctccgggggaggcggcgggaccgaccaggatagagtgaagcggcccatgaacgccttcatggtctggagccgcggacagagacggaaaatggctctggagaatcctaagatgcacaactctgaaatctccaaacgcctcggcgcggactggaagctgcttacagatgccgagaagagaccgtttattgacgaggctaaacggctgcgcgccgtgcatatgaaggaatatcccgattacaaatatagacctcggcgcaagaccaaaacgctcctgaagaaggacaaatacagccttccctccgggctgctccctcccggagccgctgccgcggctgccgccgctgccgctgccgcggccgctgcctctagcccggttggcgtggggcagagactggatacctatacacacgtcaatggatgggctaacggcgcctactccctggtgcaagagcagctcggctatgcgcagcctcccagcatgtcttcccctccccctcccccggccctgcctcccatgcatcggtacgacatggctgggcttcagtacagccccatgatgcctccgggagcccaatcttatatgaatgttgctgccgccgctgcggccgctagcggctacgggggaatggccccctccgccaccgctgccgcggctgccgcctatggccagcagcctgctacagccgcggctgccgccgctgccgctgccgcgatgtctctggggcccatgggcagcgtggtcaagtccgaacctagctctccccctcccgccatcgcttcccacagccagagagcctgcctcggagatctgcgcgacatgatttctatgtaccttccgcctggcggggatgctgccgacgccgctagccccctgcctggaggccggctccacggggtgcatcaacactatcagggagcgggcaccgccgtgaacgggacggtccccctgacacatatctga

SEQ ID NO: 10050 - RNA, 1341 nt, synthetic construct
  misc_feature 1..1341: note = derived and/or modified sequence opt6 fromSox3__Homo_sapiens__AAF73059
  source 1..1341: mol_type = other RNA
atgagaccagtaagagaaaatagttctggtgcacgttcacctagagtaccagcagatttagctagatcaatacttatttcattaccatttccaccagatagcctagcacaccgaccaccttcatcagcacctacagaatcacaaggattatttactgtagcagcaccagcaccaggagctccatcacccccagctacactagcacatttactaccagcaccagcaatgtatagcctactagaaactgaacttaaaaaccccgtaggaacacccacacaagcagcaggaacaggaggtccagcagcaccaggaggagccggaaaatcatcagctaacgcagcaggaggcgccaattcaggcggaggttcttcaggaggtgcatccggaggtggaggaggcacagaccaagatagagtaaaaagaccaatgaatgcattcatggtatggagtagaggacaaagaagaaaaatggcactcgaaaacccaaaaatgcataatagcgaaatatcaaaaaggttaggagcagactggaaattattgacagacgcagaaaaaagaccatttattgatgaagctaaaagactaagagctgttcatatgaaagaataccctgattataaatatagaccaagaaggaaaacaaaaacattattaaaaaaagataaatattcattacctagtggattattaccaccaggtgcagcagcagcagcagcagccgcagcagcagcagctgcagctgcatcatcacctgtaggagtaggacaaagattagatacatatacacatgtaaatggatgggcaaatggcgcatattcattagtacaagaacaattaggatacgctcaaccaccaagtatgtcaagcccacctcctccaccagcattaccaccaatgcatagatatgatatggctggattacaatatagcccaatgatgccacccggtgctcaatcatatatgaatgtagcagcagccgcagcagcagctagcggatacggcggaatggctcctagtgcaactgcagcggcagcagcagcgtacggacaacaaccagcaacagcagcagctgcagcagcagctgctgccgcaatgtccttaggaccgatgggttcagtagtaaaatcagaaccatcatctccaccaccagcaatagcatcacattcacaaagggcatgtctaggagatttacgagatatgatatcaatgtatctaccaccaggaggagatgcagcagatgcggcatctccattacctggaggaagactacatggagttcatcaacattaccaaggagcaggaacagcagtaaatggaactgtaccactaacacacatataa

SEQ ID NO: 10051 - DNA, 42 bp, synthetic construct
  misc_feature 1..42: note = 5-UTR of human ribosomal protein Large 32 lacking the 5 terminaloligopyrimidine tract
  source 1..42: mol_type = other DNA
ggcgctgcctacggaggtggcagccatctccttctcggcatc

SEQ ID NO: 10052 - RNA, 42 nt, synthetic construct
  misc_feature 1..42: note = 5-UTR of human ribosomal protein Large 32 lacking the 5 terminaloligopyrimidine tract mRNA
  source 1..42: mol_type = other RNA
ggcgctgcctacggaggtggcagccatctccttctcggcatc

SEQ ID NO: 10053 - DNA, 75 bp, synthetic construct
  misc_feature 1..75: note = 5-UTR of human mitochondrial ATP synthase subunit alpha lackingthe 5 terminal oligopyrimidine tract
  source 1..75: mol_type = other DNA
gcggctcggccattttgtcccagtcagtccggaggctgcggctgcagaagtaccgcctgcggagtaactgcaaag

SEQ ID NO: 10054 - RNA, 75 nt, synthetic construct
  misc_feature 1..75: note = 5-UTR of human mitochondrial ATP synthase subunit alpha lackingthe 5 terminal oligopyrimidine tract mRNA
  source 1..75: mol_type = other RNA
gcggctcggccattttgtcccagtcagtccggaggctgcggctgcagaagtaccgcctgcggagtaactgcaaag

SEQ ID NO: 10055 - DNA, 110 bp, synthetic construct
  misc_feature 1..110: note = 3-UTR of Homo sapiens hemoglobin, alpha 1 (HBA1)
  source 1..110: mol_type = other DNA
gctggagcctcggtggccatgcttcttgccccttgggcctccccccagcccctcctccccttcctgcacccgtacccccgtggtctttgaataaagtctgagtgggcggc

SEQ ID NO: 10056 - RNA, 110 nt, synthetic construct
  misc_feature 1..110: note = 3-UTR of Homo sapiens hemoglobin, alpha 1 (HBA1) mRNA
  source 1..110: mol_type = other RNA
gctggagcctcggtggccatgcttcttgccccttgggcctccccccagcccctcctccccttcctgcacccgtacccccgtggtctttgaataaagtctgagtgggcggc

SEQ ID NO: 10057 - DNA, 108 bp, synthetic construct
  misc_feature 1..108: note = 3-UTR of Homo sapiens hemoglobin, alpha 2 (HBA2)
  source 1..108: mol_type = other DNA
gctggagcctcggtagccgttcctcctgcccgctgggcctcccaacgggccctcctcccctccttgcaccggcccttcctggtctttgaataaagtctgagtgggcag

SEQ ID NO: 10058 - RNA, 108 nt, synthetic construct
  misc_feature 1..108: note = 3-UTR of Homo sapiens hemoglobin, alpha 2 (HBA2) mRNA
  source 1..108: mol_type = other RNA
gctggagcctcggtagccgttcctcctgcccgctgggcctcccaacgggccctcctcccctccttgcaccggcccttcctggtctttgaataaagtctgagtgggcag

SEQ ID NO: 10059 - DNA, 132 bp, synthetic construct
  misc_feature 1..132: note = 3-UTR of Homo sapiens hemoglobin, beta (HBB)
  source 1..132: mol_type = other DNA
gctcgctttcttgctgtccaatttctattaaaggttcctttgttccctaagtccaactactaaactgggggatattatgaagggccttgagcatctggattctgcctaataaaaaacatttattttcattgc

SEQ ID NO: 10060 - RNA, 132 nt, synthetic construct
  misc_feature 1..132: note = 3-UTR of Homo sapiens hemoglobin, beta (HBB) mRNA
  source 1..132: mol_type = other RNA
gctcgctttcttgctgtccaatttctattaaaggttcctttgttccctaagtccaactactaaactgggggatattatgaagggccttgagcatctggattctgcctaataaaaaacatttattttcattgc

SEQ ID NO: 10061 - DNA, 44 bp, synthetic construct
  misc_feature 1..44: note = Center, alpha-complex-binding portion of the 3UTR of analpha-globin gene (muag)
  source 1..44: mol_type = other DNA
gcccgatgggcctcccaacgggccctcctcccctccttgcaccg

SEQ ID NO: 10062 - RNA, 44 nt, synthetic construct
  misc_feature 1..44: note = Center, alpha-complex-binding portion of the 3UTR of analpha-globin gene (muag) mRNA
  source 1..44: mol_type = other RNA
gcccgatgggcctcccaacgggccctcctcccctccttgcaccg

SEQ ID NO: 10063 - DNA, 186 bp, synthetic construct
  misc_feature 1..186: note = 3-UTR of human albumin
  source 1..186: mol_type = other DNA
catcacatttaaaagcatctcagcctaccatgagaataagagaaagaaaatgaagatcaaaagcttattcatctgtttttctttttcgttggtgtaaagccaacaccctgtctaaaaaacataaatttctttaatcattttgcctcttttctctgtgcttcaattaataaaaaatggaaagaatct

SEQ ID NO: 10064 - RNA, 186 nt, synthetic construct
  misc_feature 1..186: note = 3-UTR of human albumin mRNA
  source 1..186: mol_type = other RNA
catcacatttaaaagcatctcagcctaccatgagaataagagaaagaaaatgaagatcaaaagcttattcatctgtttttctttttcgttggtgtaaagccaacaccctgtctaaaaaacataaatttctttaatcattttgcctcttttctctgtgcttcaattaataaaaaatggaaagaatct

SEQ ID NO: 10065 - DNA, 186 bp, synthetic construct
  misc_feature 1..186: note = 3-UTR albumin7
  source 1..186: mol_type = other DNA
catcacatttaaaagcatctcagcctaccatgagaataagagaaagaaaatgaagatcaatagcttattcatctctttttctttttcgttggtgtaaagccaacaccctgtctaaaaaacataaatttctttaatcattttgcctcttttctctgtgcttcaattaataaaaaatggaaagaacct

SEQ ID NO: 10066 - RNA, 186 nt, synthetic construct
  misc_feature 1..186: note = 3-UTR albumin7 mRNA
  source 1..186: mol_type = other RNA
catcacatttaaaagcatctcagcctaccatgagaataagagaaagaaaatgaagatcaatagcttattcatctctttttctttttcgttggtgtaaagccaacaccctgtctaaaaaacataaatttctttaatcattttgcctcttttctctgtgcttcaattaataaaaaatggaaagaacct

SEQ ID NO: 10067 - DNA, 186 bp, synthetic construct
  misc_feature 1..186: note = 3-UTR ALB7
  source 1..186: mol_type = other DNA
  modified_base order(4,9..11,19,21,27,32,38,52,58,62,66,67,69,70,73,75,77..81,83..87,90,91,94,96,110,112,114,123,127..129,131..133,136,139..142,146,148..151,153,155,157,160,164,165,168,175,186): mod_base = OTHER; note = uridine
gcatcacatttaaaagcatctcagcctaccatgagaataagagaaagaaaatgaagatcaatagcttattcatctctttttctttttcgttggtgtaaagccaacaccctgtctaaaaaacataaatttctttaatcattttgcctcttttctctgtgctcaattaataaaaaatggaaagaacct

SEQ ID NO: 10068 - RNA, 187 nt, synthetic construct
  misc_feature 1..187: note = 3-UTR ALB7 mRNA
  source 1..187: mol_type = other RNA
gcatcacatttaaaagcatctcagcctaccatgagaataagagaaagaaaatgaagatcaatagcttattcatctctttttctttttcgttggtgtaaagccaacaccctgtctaaaaaacataaatttctttaatcattttgcctcttttctctgtgcttcaattaataaaaaatggaaagaacct

SEQ ID NO: 10069 - DNA, 24 bp, synthetic construct
  misc_feature 1..24: note = histone stem-loop sequence
  source 1..24: mol_type = other DNA
  modified_base order(8,10..13): mod_base = OTHER; note = uridine
caaaggctcttttcagagccacca

SEQ ID NO: 10070 - RNA, 24 nt, synthetic construct
  misc_feature 1..24: note = histone stem-loop sequence mRNA
  source 1..24: mol_type = other RNA
caaaggctcttttcagagccacca

SEQ ID NO: 10071 - RNA, 13 nt, synthetic construct
  misc_feature 1..13: note = Kozak
  source 1..13: mol_type = other RNA
gccgccaccatgg

SEQ ID NO: 10072 - RNA, 547 nt, synthetic construct
  misc_feature 1..547: note = Synthetic immunostimulatory RNA
  source 1..547: mol_type = other RNA
gggagaaagctcaagcttatccaagtaggctggtcacctgtacaacgtagccggtattttttttttttttttttttttgaccgtctcaaggtccaagttagtctgcctataaaggtgcggatccacagctgatgaaagacttgtgcggtacggttaatctcccctttttttttttttttttttttagtaaatgcgtctactgaatccagcgatgatgctggcccagatcttcgaccacaagtgcatatagtagtcatcgagggtcgcctttttttttttttttttttttttggcccagttctgagacttcgctagagactacagttacagctgcagtagtaaccactgcggctattgcaggaaatcccgttcaggtttttttttttttttttttttccgctcactatgattaagaaccaggtggagtgtcactgctctcgaggtctcacgagagcgctcgatacagtgcttggaagaatcttttttttttttttttttttttgtgcgacgatcacagagaacttctattcatgcaggtctgctctag

SEQ ID NO: 10073 - RNA, 1165 nt, synthetic construct
  misc_feature 1..1165: note = Synthetic mRNA
  source 1..1165: mol_type = other RNA
ggggcgctgcctacggaggtggcagccatctccttctcggcatcaagcttaccatgatcgagacctacagccagccctccccgcggagcgtggccaccggcctgcccgcctccatgaagatcttcatgtacctcctgacggtcttcctgatcacccagatgatcgggagcgtgctcttcgcggtgtacctgcaccgccggctggacaaggtcgaggaggaggtgaacctccacgaggacttcgtgttcatcaagaagctgaagcgctgcaacaagggcgaggggtccctgagcctcctgaactgcgaggagatgcggcgccagttcgaggacctggtcaaggacatcaccctcaacaaggaggagaagaaggagaactccttcgagatgcagcggggcgacgaggacccccagatcgccgcccacgtggtgagcgaggccaactccaacgccgcgagcgtcctgcagtgggccaagaaggggtactacaccatgaagtccaacctggtgatgctcgagaacggcaagcagctgacggtgaagcgcgagggcctgtactacgtctacacccaggtgaccttctgcagcaaccgggagccctccagccagcgcccgttcatcgtggggctctggctgaagccctccagcggctccgagcggatcctgctcaaggccgccaacacccacagctccagccagctgtgcgagcagcagagcgtccacctgggcggcgtgttcgagctccaggcgggggcctccgtgttcgtcaacgtgacggaggccagccaggtgatccaccgcgtcgggttctccagcttcggcctgctgaagctctgaggactagtgcatcacatttaaaagcatctcagcctaccatgagaataagagaaagaaaatgaagatcaatagcttattcatctctttttctttttcgttggtgtaaagccaacaccctgtctaaaaaacataaatttctttaatcattttgcctcttttctctgtgcttcaattaataaaaaatggaaagaacctagatctaaaaaaaaaaaaaaaaaaaaaaaaaaaaaaaaaaaaaaaaaaaaaaaaaaaaaaaaaaaaaaaatgcatcccccccccccccccccccccccccccccccaaaggctcttttcagagccaccagaatt
